United States Patent Application Publication US 2007/0150978 A1 - sequence listing, part 12

SEQ ID NO: 73828 - DNA, 288 bp, Oryza sativa
agacagtaagacctattccattcgtacttagatatcttcattctaacatcttacaatctgtcgcaaacaaaagctatgctcctacctatcatagagtctataactgagtgtttatcaattcagatctcttatcttcccaggcttaatgtagcattttattaatagggccacttttatcggctaatataaccctaggtggaataattttggcccttatgccggagttatttgggacaattatgtacactaaacaatcttaaattgactacataagctggggggtattta

SEQ ID NO: 73829 - DNA, 215 bp, Oryza sativa
  unsure (1)..(215): unsure at all n locations
agcttgatgatgtggatgcagatctcgttgatagacacttcctctggtttatattataatgatgcttgacttttttctaagtctaactttntaaattgattgcagtttaagcaagccctccgtagttcgttgcaccacgctagcccacctataacaggccaaagtgcttcatcacgatgatctcatctgtgatggatacgactatcaacgagtat

SEQ ID NO: 73830 - DNA, 404 bp, Oryza sativa
ttggttagcataaaactaaaagagatagaagcatgtttgttatgtttctagcagcgtctataagctgataatagtgtcaaacacaaaacattttatagtatttctgttgaattcctatcttggtggcatgccaagtatagaatgcaagttgacgaagtagctagctaattaaagattatgtattgctagctataaaagaacaaaagttttagatccatgttcggtccattgcgttgtataatgtgaccaattatcctatcattgctaggtcggcaaacaattatattatcattgtcagtcaagtttggggagtagtgatggattgcataatggagaaatatatcttacaattgctacaggacaccgacaaaatacggcatctgctgtgggacactcgatgatcg

SEQ ID NO: 73831 - DNA, 352 bp, Oryza sativa
gagcttctttctgttttgaacacacttgattctttctcgtgtggctcaagatcataaagggaatattgtgtgtctggcatgtatccaacagcttgcatttgctttctgagcttgcttagtaacgcctggatctcattattacatttcatgtatggtgacctttgctctgaaaacatgaacaacattttttcaggaaacccagctgcaacccgggtccttctttaatccaacattcttcatctccttccttatatttgttgcttctgcccacctggacaagttttgaaagatacattaagtaaataacaaaagagtaaagtgcacgggtggtccataaacttgtattggagtg

SEQ ID NO: 73832 - DNA, 332 bp, Oryza sativa
tcctccagattcatttccacaaatgattaccctgcaaacacaacaatgatattggactttcatttcgttcatgaactttgaataataagaaatttatgatacaaatcttgcaactccaggagaagtacatgaattcaacggcaatgatacgagagcatgggcacaacgtgcctcgaattatcccatgattgtatctgtgaattgcgatcaagagctcgccctctttactcgacgttcttacaattacaaaataagctttgtagaaatctttatttacaaaacataaaagctttgtgaggacataacgacacctggatatggctgatatacat

SEQ ID NO: 73833 - DNA, 459 bp, Oryza sativa
  unsure (1)..(459): unsure at all n locations
gagaagagaaaagctgctagagccatactcgaactctttctaatgcttccggattctgatttctactctattcctattccaccagctaaatactactaaactaaacttgagagaaatgagagggctattgattnttttgacgtaagagagagctattgcttgaggtgtgtgtgaagtgaagagagtgagctccttatataaaggtagttatgacggctgtggaaggggaattctccggagtgccctccaatcgttattgtgatgcaatcctggacgtccactccaaaacctagatccaacggcgccaagattggttcggcctctgccgatcctgtggctggcccaatccagcccaatttctgctggtggcctcctctatagctccagtccgcatactcgttgaaattggcccaattcatcgtgtagttctgagatcttggccatctattataaatctgg

SEQ ID NO: 73834 - DNA, 455 bp, Oryza sativa
  unsure (1)..(455): unsure at all n locations
agcagatctaattctcttttggtgaccaggtgtcttccgtttcgtgtctagctacagtntagcaaaggcaacacgacatagatgacccattcgatctctcggtgcttgacacgacagtcatcaagaacaaaagaagcaatcagtacagctaaagccaaaaaaagaggaggtgtcgcaatgcgcctcacagcaatggtcatctcacaaataattaagggaagagctttctgttaaagccgtgttaattatgaaccggccacatcacgcacgtcatgccccagcacgatccagttgctggtgcgatgcccatttggctccaagccacaaacctcataaaataccaatgcttatagctttgatccaaggaagcaacatgagaaaagcagatctactgatgattagattcttaacccatacgttgcatcccctttaattcattaattatcgagtatctt

SEQ ID NO: 73835 - DNA, 427 bp, Oryza sativa
  unsure (1)..(427): unsure at all n locations
tactcagctacttaagagaagggatgctgcttcttacatcatcatgtgctgaactggcaattcacccagtccactagcttcttcacatatgtgagtagaatgctgagtagtgatgcatcctttgctagagtcggcaagaagaagagctattgtcataatagtcttccccagtcccattgcatctgccagaatcttataatttattgttcagttaataaaatggatatgctaaaaccaganattataattatcgaaagaaaggaaggatgtataatattgagaagatccttacccctcctcttgcaagttgcagtgtactaggaaattcagtggtggcatcgcctgaaaatacattcaagtataaaacaagctccctcctgaaatgaatgcagtataaacgtcctaatggtaatttcanaaaatcatt

SEQ ID NO: 73836 - DNA, 325 bp, Oryza sativa
tagcaagatacgcttttgcagcattgtaaacaacttctaatcttctatgggtgctgggctgacgcaagaacccgcttaactgacactgttggtttgcattgtaaaaaaaataactcctaccataatgagattttctacactattttgtgagaagggaaaacgaattagtgaaataagaacataaaaatagtagcgcactacatgcattttgctcaaacagggtgttttatagtcaccatgcaccacgtaaccttgtcaatttatgtttacaaaacccaaaaacgataaacattttcagccttgaagactcaagcaaatgccctaa

SEQ ID NO: 73837 - DNA, 475 bp, Oryza sativa
  unsure (1)..(475): unsure at all n locations
ctcagctagcannattgggggagtctcttgaacttcaatgtgggctgatttttccttcatccggngtagtttggatcacgagggcatgcgtatgtttacctgtgctatggactgcacatgatgctcaatgtcgtcgctgacaaggagggagttggagctgctgttctgattcggtcatgtgctcccgttagtggtatgcatttccgatttctctcaagtattttgagcagtatgcatttctgatttctctcaagtattttgagcattatggagcatcatgtatgatctgatcagcttttttcctgaagtaacaacaagtgaacatgaccaagttatttgggtgacttacagtttataaacctcggctgcagtttcgtttggtgctcgtttatgttagatcggaagatatatactgtaatcgcaataattttcacttctgaaatgtatgttcacttcaaactaatgtgtatgaaga

SEQ ID NO: 73838 - DNA, 420 bp, Oryza sativa
agcttagcttgtttcttgttcgcaaacattctcttcatgcgctccgcaattgggagataccacaccacctttgctgggcctcccctctttgacttacttccttcaccttcactctttgctcgtttgtatcttgatgccccacagatagggcagacatccaagtcagcgtattccttgtaatacaaaatgcagtcgttcggacatgcatgaattcttctgacctccgggcccaacggacataatacttgcttcgcttcatatgtcgtctgaggtaaaatgttcccctctggcaacagatcctttaacagctcaaggagttctgtaaaattcttgtttaacagccattactagccttaagcttcatgagttccaacacgcatgacaacttactgtgcttcgacttgcatccatcatacaacg

SEQ ID NO: 73839 - DNA, 343 bp, Oryza sativa
aggatctgttgccagaggggaacaatttacctcagacgacatatgaagcgaagcaagtattatgtccgttgggcccggaggtcagaagaattcatgcatgtccgaacgactgcattttgtattacaaggaatacgctgacttggatgtctgccctatctgtggggcatcaagatacaaacgagcaaagagtgaaggtgaaggaagtaagtcaaagaggggaggcccagcaaaggtggtgtggtatctcccaattgcggagcgcatgaagagaatgtttgcgaacaaggaacaagctaagcttgtgtgctggcatgccgaagaacggaaagtcgatactatgct

SEQ ID NO: 73840 - DNA, 399 bp, Oryza sativa
  unsure (1)..(399): unsure at all n locations
agcttgacattactgaccactgggtctagtaccagggggtaccgccccgggtggaccactcggtcaggatgatccgagcggtcaaacttgattgcaatctctgaccatcgaagatattgnggcgtgtcgggctgaacggcattgatctcccgttcggtcaacttttgcttccgtttagactcataagccagggggccgccgaagatatnggtgagctccttgcggtggtcttgaaaacctgccggggtgtcgccgtcgtccttcttcctcgacgtgctttgttcttcatcggagttcttccgtgtagtcttggtgtattgatccgcgaactgcttgtagacgaaacaatctttggccacgtggttggagttatgatggtgcgggcattgggagttcatg

SEQ ID NO: 73841 - DNA, 342 bp, Oryza sativa
  unsure (1)..(342): unsure at all n locations
agtctcatggactactgttattgtgccacgttgtaagactggtttttccaagtcagtagcaatgtgtcaaatacttcgtcaaacatacaatagtgtaccttaaatatagtcatgctcagaatcaagagaatggtactctttggcaaaaaaaagaaataagaaaaaaagattaggcagcaagtttagttcaaaccatccccagcaactccttcctgtaccttctaattgagctcattttgatgcgttttgtcatgcatttcaacatcattcttcgaaggtgcataatacatggtagaatgcanaccaaacaaattcaattgactaccttcctttcttcccccc

SEQ ID NO: 73842 - DNA, 384 bp, Oryza sativa
  unsure (1)..(384): unsure at all n locations
agcttcttgtttgtattccgagantgcttcgcttggacatacaaagagatgccaggacttgaccctcgtgtcgccacccataagctggcgattgatccccaatttctgccagtgaagcaaccaccaaggcgcttaaggccagagttccaagaccaagtcatcgccaaagtcgatcgactcatcaacgtgggttttatcaaggagatacaatattctcggtggttagccaacatcgtccctgtggaaaagaagaatggacaagttcgagtctgcgtagactttcgcgacttgaatcgtgcttgtcctaaagacgactttcccctaccaatcacggagatggtggtctattcaacaactggttatggcgcactgtccttcatggac

SEQ ID NO: 73843 - DNA, 410 bp, Oryza sativa
tctacttatttcttttgaataaaaattcgatcgtttttctgtttaaattacacgtactactttatcttctttttggtttactttcagaaaggaacaagtaatctattttgttgtagtagtagtagtatcaaacacacacaagtttgacgcgcaccggcaccgcccctgtaccgaaattgtttggtcgcctttatcaaaagacacacacgctgcctctctgttgctgctgcggtgtgtgtgctggtgctgcagctgcaggactagtactagcattcatttcagactgcaacgtccgacttgaagcaagtttatccaattgctatggacgctactgttatcgattcgaaatgataaaagcaagcgtcaaaaccataccgaatttgtaacctgtgataaaaatctagtagtat

SEQ ID NO: 73844 - DNA, 444 bp, Oryza sativa
  unsure (1)..(444): unsure at all n locations
agcttattaagtttactttcaaatggatttcgtcccacgtcaaaactcccaccaagctatcggaaatctacaaaacaagctacatacctcatctagttcgaatctgatttgggtcttaggctaagcccaatggggtgtgcaccctanggtaaccctaggatatccttaatcatatttattcagtagccgtcatagtttagaatcgggttttgcttagattaatttgttaagaacaatttcactgctagatcggtttgtgaaaccctaaatttgagtgcttaatcattcatatgcaagtgtgttgcaatctatcttggtcttacttgtgttctttgattcgcatgcagggattagccttctcagtgatgtcaaccggatttcggtacagctgataaccagnggagaagtagtgctgcgattgtagggtttagatcgtgttgatcg

SEQ ID NO: 73845 - DNA, 323 bp, Oryza sativa
ctattacggacctataaatctcagcttatcagccccgaagggccttcaccgccctccctgttgtacgaacgttggcgctcaccttggtgctcttgtctcttcattttcttttgctaacatgatctgagttcctttgtagtgagattccttcccagggaatcccagggtctaacccctcgcacgggcagtctgggctcggccaatctaaggccgcggggtcttcgcagcctcgcggtggggcctagaagtcacaccctgggcccgaccccgagcggccctcatgcgggacccaatctgccgtgggcgataggggtggtgactct

SEQ ID NO: 73846 - DNA, 449 bp, Oryza sativa
  unsure (1)..(449): unsure at all n locations
agctctatttatcttcaacaaaagccatgtgtacctatgaagcaaagagcacaccagctagagctgatcatttgttttttatggtttactgcgtgaaaagtccaatagagatgncaatttttatctccttactatctattggctattgctctctagggacaacatatattgttcagaatttttttgggtggttcatcttgtttgccatcagattcatttgaggtttatctatgctttgacgatggccaaggaggatcagttccatttgagccaagcgattatagttatttttcctgtgcttcatgtaaaatttaattattatgcttgtttctttacaggaaagttgtgagatcatgatgagtggcatgcctacgctgactctcttgagcttgatatgatgtcctgaacatgcatgttcatgtgagcaacattatactttaatgcaccag

SEQ ID NO: 73847 - DNA, 365 bp, Oryza sativa
  unsure (1)..(365): unsure at all n locations
tcgggacctattcgcatagaaacttgaagaaattctacaagcttcatatctctgtccgttgagataagattttctgtggttggttctagtgtgctcctggttgtgaaaaaaatatcaaaaaaaaaataataaaaaaaaaagttgtgcctctcttctcagcactagagagagcnnttnaaaaaaaaaaaaaaaaaaaatgaggatacagcgagcacaccacaccattcccccctttgtcaccaccttccaccaccggttcttggttttcgtgctggttgggtttgagttttgaggcgtcctttgtggttaggctcgcgtctctacttcgactagcctaggaccagcactgtacactatacccttga

SEQ ID NO: 73848 - DNA, 338 bp, Oryza sativa
  unsure (1)..(338): unsure at all n locations
agatttatgcccacattttatctttccaaaacgtgtcttgcacgtgcacgattactagtcaatcttaaaattggtagtttattttctgaatgtattcatagagataggatgcgtgcacatgtgttcatatgggtgagtgtgcgtgtgttgttaaacatcggcgtttgtactgtgtttaaaaaactgctaaattatattactattttatatacaaattgtttaaaaatatcatataaatctactcttaagttttaaataattaanaacttaattaataatatgttaatgattttctcatcttaccttaggctgagttcttatctctagttttccaactt

SEQ ID NO: 73849 - DNA, 388 bp, Oryza sativa
tcttcgcggcacctcgttgcccgcgtgccctcttctgttcttcggagggttgacttccactagcctcctcctcctggttcccctccacatccctttccacgtgcccctcctggttcccctccgcatcactctccacgttcccttcctcattcaaatactggtttggatcctcgttcccctcttcttcgttccagtactggctgcttccctccgcgattgaatcgtacaatatctgttcctcatcgcaatcagccatctgttcatacaggaaacatctgctaagtcatgagacatctatgtgttaacaatcttatattaaaactcaaataatcttatatgctaagactaaacgaatagtcatgtatgctaagtgtaactgtcggatatt

SEQ ID NO: 73850 - DNA, 343 bp, Oryza sativa
  unsure (1)..(343): unsure at all n locations
tagcttatatccggctagccgaaaatanggtgggcacacagacaatggggagtggagggttctacttatttagtccctatctatttaactttccatggatcaaagttgctccaaattagccattggattttcatctgggtttctgataccaacggatgttttgaggatgatgcggcgattgtccgtgcgttgttctgctttcatagatcgtgctcaggcttgtccaggttgctgctgtcactgtccgccatgcggctcgagccacggccaagctttgataaagagcccatggccgaaggtagccctttgaagctgctgctgccctcactgaggttgtgagatc

SEQ ID NO: 73851 - DNA, 463 bp, Oryza sativa
  unsure (1)..(463): unsure at all n locations
taattaagctaatntcaacctacagctaagtatgactcgctcatctcgccatcacaaaagttgattagcatgtgagcccaccaattgattaaagccattntgtatactttcacattacctcacagtcactacctaattaattaattaactaactagtgactccgtctgatatatatgtaattaagaaattaacaatgcatgatttgtttgctggtttcttggaagccaaccaccacctcccaattacttggaccctggactgtcctcatttctatattactacttggattatatgtgtgtgcatgtgtcactagtctagctatgtgtatctcattaccatcagcaaaagaatctgtacattcttctgatggcaaactggtaatcacatgcatgctgaaattaatgaagagtgcactgatcatgaattagtagctaataataaaatcaagagtaaattcactat

SEQ ID NO: 73852 - DNA, 429 bp, Oryza sativa
  unsure (1)..(429): unsure at all n locations
agcttcttcttggccattccaaaactgcacttttgagccttgcgtgtatgattcaaatatgccaatgaaatgccatgtagatcaatgaattcctgaagtaacatcaaatatgtcatcgatggtgtcacctccttacatcaatgggcttattttatcgctaacacaagcagattggaactttggaagagtttatggaaatgttagatatcttggaacaaattctaagagtttttctgattgcagctgtgaaagatctctcacatatctgctgcaattttcataatttacaaaagatgatagtgcagaaattttcaatccaggttaattaagtggaaggactagtaacttcaagtaatgtacagttattccgttcatacctgcctggtaaacatagaccttctntgcgcattttatttactcatttccatg

SEQ ID NO: 73853 - DNA, 468 bp, Oryza sativa
  unsure (1)..(468): unsure at all n locations
ctattacggacctatgaaactcagcttgacacggatccgttctgtatcctagctagcttcttttgatctgggcagctggccaggtgttcctttctgctacaccacatttgccaatatatgttaacatactccctccgtcccaaaaaaaaggcaaaccatagattntcgtgtccaactttaactgtccgtcttatatgaaatttttttataattcgtattttcattgttgctagatgataaaacatgattaatattntatacgtgacttgtctttttaatttttttcgtaattttttcaaataagacgaacggtcaaacattggacacgaaaaccagggtttctttttttgagacggagggagtacacaaggagccggatctacctttcaatatgtcagcgagtgaattttgacccacagaattaacgtcacgacagctatacagctcacaacgtctacaatatttact

SEQ ID NO: 73854 - DNA, 394 bp, Oryza sativa
  unsure (1)..(394): unsure at all n locations
agctggttttttcatctttctacaagaaaggaattggtcatcatttgtagtgcaattgtcaagtgtactagtggataccttctcatcgagattccattgaactaatgattcatagagctcgtcgctaataacctcagcagtgtggggacttggaacataaatgaacctatatttgaataaacaatatatgacatcagattcgtagcacanaattacaaagtagatgcaatcatattgatgttgacaatagttacctcatgattatattcctaagagcccaagattcatcaatgaaatgtgttgtgatagccatgtaacctctcttttggttgtcagaggtccacatgtcgatagtaatagccacccttgacttgacagtactcaacagtacccc

SEQ ID NO: 73855 - DNA, 445 bp, Oryza sativa
  unsure (1)..(445): unsure at all n locations
ctcagcttccttaaatttattgagcatgcactgtatgggattgaatacttgttttagaattcgacatttcttcctagctatatatgggcttcaaatgatttctaaagcactattcaagctaccaccttttattatattccgagtcactaaaaatcattcatcacttgtatttacaccagtccctttatgtttctatttgcagacattcaaatgcaatgggcacaaagtagtgcacctaaggcccatgaagaggtccaaacatcacagacctaaggctgggacacctcgctgcacgacttgccagtgctggctccacaatgcacccagcctcacctgttcacttagctgcaaggttattttcatcatatatgcacaagtactggtatntatcatgatcatgttgactcaattgattttgtttagtgggcaagctatgtgctatata

SEQ ID NO: 73856 - DNA, 428 bp, Oryza sativa
  unsure (1)..(428): unsure at all n locations
agcttcactctcttagcgaacgggctcgtccacatgcccagcagcttcagctcatctcctgctccggccattagcttcttctagctgtagcttggtggtgaactgtgaatcgtgtgagtgaggttttgagatttgagatggttaaataaatggttttggttcgtgttctgtggacggcgtagctagtatactgattgcgtggctcgttgaatgcgcgctcccatattcagatgtattgaaacatgtgatccgctaacctggtctaaaaaattaaacgaaggcatattgaaaagaagtaaatcactacatgaaggcattgaaaatgacacctggatcgatgacctggagctaaatangaacactacttttacagtggacctgatcagccaacttgtgtccctatggagcgcaacccacgacatcatact

SEQ ID NO: 73857 - DNA, 368 bp, Oryza sativa
  unsure (1)..(368): unsure at all n locations
agcttcttctttttttctcagcgcaacaacagcaccaaatcctcagctgcagatttcctctccttctcctacttctgcttttctctctccttcctaccggacgggcctnctggcgcaactcagccagcaagtgcacgcccggtgccctcagcacttccaccacgtcggcttcctctgccgtcgctgcctctgctgcagctgcagcagcccgctccttcctcccttcgagctctggcgacccctgtcgtcgacgccgccgccgccgctcctccggtcacagcgccgcagccggatcctacgccgacgatccacgcccagctcagctcccttgccaccacctggctcctcggcggcagccgatccgtgcc

SEQ ID NO: 73858 - DNA, 310 bp, Oryza sativa
  unsure (1)..(310): unsure at all n locations
ttggtaccgatgaataagattcatgatggtcttgggtgaccaaacagaccatggatgctttttttttcttcatcattatttcttccaattttggntttttgcttgggtattattgatattaagaaaatgcctgattggtgctatatatatgcctgttttgattccctctgaattcaaagtgtcngctgtgtgatctcacgtgtcggcacagataacctttggaaaatgaataaataaattttactacctagtactatcttctactgctaatatacagnattagtgactagtgagagcataaaataaaata

SEQ ID NO: 73859 - DNA, 336 bp, Oryza sativa
agccgacacaggtttaccatatgccgacgagaggggtcccagaccaacaacaggttatgtcccagaccatactgtgccaggaagcccaggggtcctccccgacaccaccccggcgaattcacatgtctctcggcatcaaggctcccctgataagctagatattcagccaggggtgtcccattccacccatgtggtcgtacttgtcttatgtttggatgaaattccaaggaaacggtccttaagtgcaagagcgggaaaccgtacacccggtacgttccccggtccgcgggtttgggaaaatcacttaattcgcaagcaccgacccaggtgtcgggt

SEQ ID NO: 73860 - DNA, 497 bp, Oryza sativa
  unsure (1)..(497): unsure at all n locations
tgctgatcttgtcgactaagacatcanactgtgtctgggactttatcttgcggtctgcatcaacaggttctcattaatgagtcagcatatggaggataatggcttttaaggtattgattgttggtaccttcaacctcctttaaagccgagtccctccttgtcatcttccagagttcgaatctgcttctccagttgagatatcttggcagcttgcactacattgattgtggttaatcaagattgcaaagataacagcgcaagctagttgggcagagtttgtacgtacctcttgatgagccacttagttcgaaattggattcctggagctcagcaattcgatccctcagatcatgttcacttttcctggcaagttcttttgtttcgcgcagctgattcctggtggcttcgagggtaccgagatgaaagactaacctctctaaagtgccactttgcttcgtcctagatgaatctctgcagacagttaatagcgttgacta

SEQ ID NO: 73861 - DNA, 399 bp, Oryza sativa
agcttcacaccctgttaaagagaaacatgtcactaatgtgcttagtcaaacatgttaagttgtgcatacaacgcctgcgtaagaaggaggctcagtttgacgctaagtctaccaattcggtccctttttgtagaatatacgccgacccattggagaaagacgctgcccgtatatacaccgcagtcgtgttcaagaaagtccgtgcacagatacggctaattgcaggacttgaagtcatcagtgggactaatcaagatggttcgtcattgtatgttgatgggttgaaagacgatcatgatgtgtcggatgaagtgagggtttcttttaaaggccaagctttggaaggtgtggaatgtcactgtccgaagatggagtgcgaagacattccttgctcacaca

SEQ ID NO: 73862 - DNA, 496 bp, Oryza sativa
  unsure (1)..(496): unsure at all n locations
actcagcttccganatggttaacatttcgttcgtcgntacacgtcttgttccatcgctaggaaaccacacaatttcccactctattcttgctatgaaanttgtcatgtaatgcatgcaacttcttgtatctacactacaacaaaaaatcttatgtagagtcacttttgtagaggcgatttttaaattgcctctaaaatctggagctctatagtctagagatactttttagaggcacttttaaaatcgcctaaaatatttttactctagagacattttagagacaagtttagcatattttgttaaatttatctcgtagagacatcttttcggcactttaaaatatgtctcatatgtaaaggcattttcttaaagcatttaaacctcttgagaggcacttcttcgaatattattacatactaagtaactagatataagtaacacgaagcacatatttatatgtaatatatgacgtgagatggttgtgaatgaaataaa

SEQ ID NO: 73863 - DNA, 433 bp, Oryza sativa
  unsure (1)..(433): unsure at all n locations
agcttatattatgcttatagctcagnattatacttgctctaaggagagtgcccattccttatagtagttgtagcataaccatataaataacaaccacacatgccttctcgaagataggacggtttgtagcccccatagagtgtctttgaagtggcacgttgtaagagaatgacatattgatcaccatagataaatagtatgacatcggtattactatattgttagacttttgctttcatcggtaactgttgcagtaattgaatgccgttgcaagttacatccattntgaaaattttacagccactacgacaacaatcatatccgaacacgtctacttacaagttaaccaataaaagtatctcttgctataggttattttcgaaatacgtctaaaaggaaaccaataaggaatagcattgccatgatatcatac

SEQ ID NO: 73864 - DNA, 386 bp, Oryza sativa
  unsure (1)..(386): unsure at all n locations
ttgtgcatacgacaagctgtgcacagagantgcagtttgttgttcatgaacctnccacaagcaaagaactatcaacaggattagctacacgtattaccaaanaaacgacttcccctaagagctagccaaattcactataaaaaccatacactggctgtaaagtggtgagaatatccctgcccaactaggtttctgctagaaagagcgccttgctaaacgtcaaacattcacaacttgatggcacatgccgtcaacacagctgagttaattaattgcatagccaagtattgcctgcacctgagacaagagctaaagagccagtactgtgatgataaagtactcaagaaatctgagaaaggtntggtgtttattacatgacagggaca

SEQ ID NO: 73865 - DNA, 238 bp, Oryza sativa
gctatttttttttctctgcgtacaagagccttccggactccacacaaagcacctctcttaccgtatctagcacccacacacactcccgggcgacatgtaaccacccccaagagagaacgccgcgcgccgcgcgctgctaataatgctcgatggcgatggtctctcgcgacgccgacaccgccgtcaagccgccgtcggacgtggagaagccggactacagctcccaaaactgcgcccc

SEQ ID NO: 73866 - DNA, 494 bp, Oryza sativa
  unsure (1)..(494): unsure at all n locations
tcagtatatcttcagctgctntgtatctttccccacacatcttctaacganaaatggtttctttcaatctcttcaactctggttntgtttgtttcgcatggtaaactcatagttgcaattccccgaagaagaaaaaagaagaanaacacatagctgtaatggttcatttcaattttttgttttgtatgttcgacatggtaagacatggtaagctcatagttgcggtggttcagttcgacctttgaattttcagttctttttcttgacgtagtaaacacacagttatagtctcagtttttttccaagtaatattgatcaaaatctgaccatgttgttgaaattgggaagtgtttcatttgtaaatactgggcatgcaatatactctagtaaatttattataagtttgggcagccaaattgacaaccccagatttgacataacagaaaattggcagcattggtgtgggcaactngatcaaatcagtcatggtacat

SEQ ID NO: 73867 - DNA, 403 bp, Oryza sativa
agaaagacaagcctgctgacaagaaagattaatcagacaaaggcgatgctggagagactaccctgagaccgctaaacatggaggacttgagaaaggcaaaggatgaagtaagtcactgacggattcttcatgatacacacgcaatgtacttatcttagctatccttttcacagcaagaacatattgctaagctgttgcgcattgaacactatgcaggtcgccgctagcttcgctagcgaaggcgttgtgatgaatcagatcaaggaatggaatgagctctacggcaaaggcgggtcgaggaagcgggagcaactgacatacttcttgtagtgaagaaatcattacttgtatatacatttgtagtggttgtgggtggcatctggcccccggatgactggatgta

SEQ ID NO: 73868 - DNA, 498 bp, Oryza sativa
  unsure (1)..(498): unsure at all n locations
ngcagtgttaagaattcatgtatgttttcttgaccttcttcttgttttcctgacttctatatgatgataagtccagttagcggaatttgaacataatgaataatacttgtgatgaatggattgtaatgtaaattcgttctctccagggtggaggctggatcaggaaagttaattactaattaggctccagcttttaagcctaatattacatgcaaaggcaacttttatagtttacagtatctgagtctgcaaatgtctttaaaacattggtccgtcaagcattgtggttagctgagcagatactgcaattaccaatggaagacatacttgtattgactgggtagcttgttgagaattntaatatggcttctaagtttggtttgaagaaacaattangtagcggatatggatcangaatagtataatggcctggcagctgacccccttttcttaanaagatcatcctgcttaaacttcaggttaaaattctgctgcatc

SEQ ID NO: 73869 - DNA, 438 bp, Oryza sativa
agcttacataagaggcaaggaaagctattagagccatacccgaactcttccaaaggcttccggactcctgactcctattctatttcttttccaccagctagatactactaaactaaacttgagagaaatgagagagctattgcttgaggtgtgtgtgtgaagtgagaagaggagctccttttataggcaggtaatgacggttgtgacggttggaatggttggtaataccctccaaccgccgttggggatcaatcccagccttccatccaaaccctgcatccatcggcgccacgggaggttcggccgaacctgtggctggcccaatccagcccaatttcagctggtggcctcctctattgctccactccgcagactatgtgaatttggcccaattcatcgtgtcaattctgagttcttggcctattcacacataagtct

SEQ ID NO: 73870 - DNA, 366 bp, Oryza sativa
  unsure (1)..(366): unsure at all n locations
tgcccaagaatatatgtgattaacgacatacgtattttttttttttattacgatactagntatttgacaacgggagagttatgcataaggatgacagtcgacaaaagacacacgggatgctatgctaccaaccatagatggtggaactgtacaaggattaataaagacattaactaaatctcatcaaaaagcaaagatgtcgactgtatctaggacaccggagaaatctaaaagaaattgaaaaccgaccgcagattatacgaagtagattataacagagtaatccctattagcttgtccttgcaaaaaaactgattccatatcctatccattcaaacttggtcccatcgatggagcgatcaattc

SEQ ID NO: 73871 - DNA, 459 bp, Oryza sativa
  unsure (1)..(459): unsure at all n locations
tctgngatgtntgttatgctcaaatttcgctaatttccttattgttattgattntcacattctaatgcagattttaaatgtacttcttttcctgatttctattccattagcttgcttaatgtggtcaaaaagcaaatagaaccaaaacagcccactgggaaaattaccccatttacaatctatgcatgtataaattacgaaagcccaatgctcaaagttaggttcaggacccccatcaatatatatgagttcttcggntctttctgtttttgtatcttcacacctttcaattacttaacatgcaagtcaagtactaaacgtaatcaagcctagttntattacattatagcattgaggaaaccaagtctaatatatctatgcatatatggccaccaatgcaaatgcaagcattcaacctatcaagctgtaacagatttcaggaacaacatatattaacta

SEQ ID NO: 73872 - DNA, 328 bp, Oryza sativa
agcttatggatgtgcaatgcgtcactggctgtatggccgccctaagtcggttcatatcgaggctgggagagaaggcgctacccctatttaagctcctcaaacgctccgggccgtttatctggacggaggaggctgaacgggccctcactcagttgaaggcgtacctcagttctcccccagtcctggtcgccccggagccagatgagccgttgctactctacctggcggcaaccccgcaggtggtcagcgcggcgttggtcgtcgagcacgacgaggacgaccctcgctccgcgcatccccaccctgtgtcgactcgacccgggagaga

SEQ ID NO: 73873 - DNA, 472 bp, Oryza sativa
  unsure (1)..(472): unsure at all n locations
ttaaccaagctcttacaagatcttaccaatgcaagtggaatggtgatgtacaccgactcaaccaagcaccccaatagaggttggatatatcgatgcctcggcaaacacttgctgtacggctgcaatcaaatctgtggagctctgggtaggcttaaatatgtagcaaaggaatagcaaatgctcaaatcagagaacgcanagttgaataattgttcaaagtcaagtaccgtgctggtcctaggctagaacgtactagagacgcgagcctagacacaaacggtaccacaaaatagcaccagaaacaactcaagcacactctgatgtatgaagttcagctcaaacaaaacaatattntctctnttctttctttcttctttcttctttntctttttttttccttttcttttctgattatttttggagcggctnnntttttctttttttttttttgacctttctgcctttttttctc

SEQ ID NO: 73874 - DNA, 370 bp, Oryza sativa
  unsure (1)..(370): unsure at all n locations
gagctggctttctgttaacgactaaatntggtaatatcagtgtcggagataaagactagaatgaagcggaattgaagacgaagattgtccggatcggctacgactaggatcggctaagtctgagtcagactgggttaagtgatacagccgattctgacaatacgacttgtgtacgatatcgggttcgagttggtaagcttcaagatgattgccgcgcatggatanagtccttgaaaggcaattgtatctattaattaggatatcttatgtaaattccttagagataaatgtgggctaaagtctcgctcaaagacttatggtatcttagagttagttagagataagaagtcgtgtccaatatggacatatc

SEQ ID NO: 73875 - DNA, 323 bp, Oryza sativa
  unsure (1)..(323): unsure at all n locations
gctgatacggtattataagcggcggctaaactcggcttgcacatgcatgtgagttntgaggctcgatctaatcgatcatgcctttggtaaggactctatggactactaagaggctcaccaatcagcaaatgcggttcggcgaagtcttggcgaccgtgtactggttcngcgacagcgcggctgctactgtcgtcatcgacggtgtacccccaggcttctacggcaaaaagaggatgcatgattctgtttatatcaacacaaggtagctctatgcgaaaaatattgcgccgaagctcaccaaagaaagagaaagaaaggaatgg

SEQ ID NO: 73876 - DNA, 323 bp, Oryza sativa
  unsure (1)..(323): unsure at all n locations
acattgcaatcattagtagagtgagaatgagaatcatgccacttacaatatgctcgacatttcaactcttcttgagaaggtatgacatggcctttaagtaatctaatttgttctcttgcaaaagataatcaaaaatcttctcacacttggcccacgtcaaactatacttaaccttactttgccgatctttgcgaggagtcggcattatgttagagcaaacaaaaggcttatttnntgtagtccatgaccattcngccacataaatatcatgatcaccctctttcctactatcactagcctcagggtgatcgaccacattaaca

SEQ ID NO: 73877 - DNA, 444 bp, Oryza sativa
  unsure (1)..(444): unsure at all n locations
agctttgcatatctccagctagctacacatgatgtaaccagttcgcaggatctaccgagtacaccgatctaactctggtgcctgcatgtttgtgatgtacatgtactgcagtggagcaagtgacgggatgcaattgaaggggcacggcgacagtgcgaggaattaagaggaggccaaaggtgctctggcgattaacaagctgcacatgaagggttcgtccggttgtcggactaagctgcctattcgattcgtttaattcgctctaactcgtgcgtccatgggggcgcacgcccatcaaaaatctgtaacaagaaagattcaattcgtctctcgtttaccagcgtatttttcaatggtaaaccccttctttttcaagtgtctgagtccagtcgctgangggacagtgaacctgaataaatcgtcataatctctcgtcatatattc

SEQ ID NO: 73878 - DNA, 426 bp, Oryza sativa
cgtcatctcgtgccggcttgtggttgttggcggcgtcgccctgggtgcctctgcgagcgccaccctcggcgcgtcttcgcacgcgcccaccgcagctagacgcctccgcgcgccttgcgctacttgcggccgcctgtcgaggaagaggactccctcttcctcccgtcatcctgacaagcctcccactgctcccgagtgagatggagcttcccaccaatggtgatagaccccgagagaagttgtggctcatcgccgtcgacgaccttgatgcgacctttcgcctcctcgattgacatcgtggagaggtccagcagagactcgatcgagcgagcgatctgcctgtacttctctgggatgcagcagaagagcttctcgacggctctctcctcgtcgtaagtgtcgtcatcgtactgcaccatcttctac

SEQ ID NO: 73879 - DNA, 399 bp, Oryza sativa
  unsure (1)..(399): unsure at all n locations
gcttatttttcactgcccacaaatctgtcaactgcaactggtcangagggtaaaattgagacagacagacaatcaaccgaatagcacgttagccaaccgaaaaatggattccgaagattgccacctaatgtgtgacactgaaacaatgattctgaatacacaatacaaagagaataatctaattaccaactaattgtattctctgaaatttctgagctgtcctttaaggtcagatgggttccacgtgaaggtgaatcacatggcagcatccacagccttttacgctgtcaaacaaataaagaaaatagaacttaagaatatcgacttcaaccatcaaatagatacagacacttgcaaattttggataaactatgacacaatggatgacaatcatatgaa

SEQ ID NO: 73880 - DNA, 474 bp, Oryza sativa
  unsure (1)..(474): unsure at all n locations
tgtcaatttcatagcanacacacaaagctactagtgcttgttctgctaaccatacctctcacttggccgttctcgtgctgggggctcaacatactcggtccattcccacgaggacagggtggttacaaattcttgttcgtggcgatcgacaaattcaccaaatggatcgaggcaacatccacaggggaaatcaaggccgacaacaccatcaaattcattaaggggatattttgtagatatgattgcctcaccgcatcataacggataacggctcccaatttatcagcgccgatttccaggattactgcatcggactgggagtcaagatatgcttcacctcggtttctcaccctcanagtaacggacaggtcgagagggcaaacggtatattactacaaggaatcaagacccgtgtctacgacaggctcatgtcacatgacaagaagtgggtcgaagaactcccatcngtactat

SEQ ID NO: 73881 - DNA, 386 bp, Oryza sativa
  unsure (1)..(386): unsure at all n locations
agcttttctactctatcaaagtcttcaatagtttctccaatatcgntctttgtagaccgatattcttgcaccctcttttgcaaccactctaaattagcttctttactcattatacaaagtaatatggtctagccgtgctatgctagccggctttatagaaataggtacaaaatcaccattggaaacacaaatgatatcatagctagaaaggtctaaccccgataagcattgaatattccaatgtcgccactcaagtgaagcatcggtctttgcaaggttgaaggcacacaacaattggtatggatccaagaacgacccaaaataacatgataattaccttgcgcatcgatgatgaggaaagtagttggtaacgtcttgttccccac

SEQ ID NO: 73882 - DNA, 450 bp, Oryza sativa
  unsure (1)..(450): unsure at all n locations
acgcgtctcatgtgttgagacaaggctcatgtgttggtcttcncnganngcgggtaaagtgtacatccactgtagtgtgagtaaaccaaatctattcgaatggccgtgctcgcgggtattgaacatcangacatgtattacacttggctagactctaaattctttaactggtgtgggatgggatattgcatgatgaaatttatgctgatggagccacttcccgagaggagggaaggtggacatccttagaaaaccatgacgattcaatagcgggaagctatccttgggatcacaatggatggtggacagaaccgtcgttgtttatagngaacactggtactaaaanttgatcagtctatgctaggttntaggcttgtgaaaagaattgtaatattagctntatgcagaagaacctgaagccattccttgaaataccctctatcatatgca

SEQ ID NO: 73883 - DNA, 448 bp, Oryza sativa
  unsure (1)..(448): unsure at all n locations
agcttctttttgaatgcgcagtagaggaaactgaaaacatatntttttcaactgttataacaaataatccgttttcaataatccggtgaataacctgaaagggtattatcggtaaattttagtgaaatttctgtacaaatcaaactgattcctatatactcccctccgtccctaaatatttaacgatgttgactttttaaatttttttaccgttcgtcttattcaacaacttttgttaatattattcaaaaacttgaggagtagtagtatatttaacaataaattaaatgataggaaaaaaattaataattacttacaatttntgaataagacgagtggtcaaacatgtttaanaaagtcaacagcgttaaatatttatggatggagagcgtcaaatatttagggatggagggagtatttaaatagagcgcatgcaatcctgtgtttc

SEQ ID NO: 73884 - DNA, 327 bp, Oryza sativa
cagtggtgtcgacaggagtgttacagggcttgctatctgttctgcctgcacgctcgaggatgtcaatgcagtactgccgctggctgagcacgaggccagctgaattcctggtgacgctgacgccgaggaagtggtggagggcgccgaggtccttcatggaaaactcgccctgaagggcggagatggtccaatgaaagagcgtgcgtgaggaagccgtcagcacgatgtcgtcgacgtagagcagaaggtagacggtgtcgttccctctgtgaaggatgaacaaggacgtgtcggacttggcctcaacaaacccgatggactgtagaa

SEQ ID NO: 73885 - DNA, 439 bp, Oryza sativa
  unsure (1)..(439): unsure at all n locations
agcttgtttataaatcgtagtttgagaatggtagttatctaaaagttgataaacttagaagaaccggagaaaaagaatgaaatcgtccaaaagtcttttgaattttcatctataattaaattaagaaaacaatatggaacgtttaccattttttgattaggagtaaatagcaaatgtacactattattgccttagcaaaatgttcattgaaaactataatacattatccccttcgtcccattttaagtgtggttatggatttctatatttaacgtttgactgtttattttatttgaaatttctttatgattagtatntttatacatgattttttaacttttttaaaataaaacgatggttaaatgttgaacacggtaggagtactaactaacataaggtcatctcatataagatttttttcttgacagaaaaaaaagaa

SEQ ID NO: 73886 - DNA, 458 bp, Oryza sativa
  unsure (1)..(458): unsure at all n locations
agcttttatctcatcgnttattgccattacggtcggagcgggaattaccctggcggtgctgattctctcaaggtcgattgaatttatcccgatgcaggtgatccctatcgccgggatgattgccggtaacgccatggtagcggtggggttgtgttacaacaatttatggcaacgggtcattagcgaacagcaacagattcaggagaaactgagtcttggtgcgacgccgaagcaggcttcagcgatattgattcgcgacagtattcgcgcggctttaattccgacggtcgattcagcaaaaacggttggcttagtgagtttaccaggaatgatgtccgggctgatatttgccgggatcgatccggtgaaggcgaataaatatcagattatggtgacctttatgctgctctcaaccgncagcttgtcgaccattattgcctgctattaacctatcgtag

SEQ ID NO: 73887 - DNA, 394 bp, Oryza sativa
agcttttatcattcatgcaagcatctagggttttctcaaaattaatactaaaaattgtaagtcgattattcaaactagcaataatagcaccacctactatttgtcgtcaacgggcactgtgaaatttccttgcttgatgacgccttgcctcgtcttccagtaatatgaagctatcttccgccgcaattcttcaaagtgagcttcaagttcctgacgattggctctcgacaactctcaatatgtggtcatgatgatgtcttgatcaagattagtatgagagcccatggtaggaaacaagggtttcgcctatagcaacagaaatcgtcccagcggagtcacaaaaaaattgtgttggcaccaagtagcgccatcacacattgaacatgttatatgt

SEQ ID NO: 73888 - DNA, 398 bp, Oryza sativa
  unsure (1)..(398): unsure at all n locations
tagtagtttgatgtaggcatcaatggttgaatcgatctggatgatggaaaaaagcatttgaattttgtgaaataattgatgatatactatttcattgaatgtgtgatnttgcaattgttttcgagtatgtcttactgttgatcttttttggccctattgccaaatgttaaatctagaaagtactttttaaaatctcagatctgattcggttatgtaaaacttgtcctgatcagactactgatagcagtgcccccacatgagttgaaaatatgatatcatttatatattttattgaaaatgaatatcctttatgatggcataagcatatgctgctgcttgtcaatatcctgctggttattattatttatgcatggacatcaagacatccccagccatac

SEQ ID NO: 73889 - DNA, 387 bp, Oryza sativa
tttcttgtcttgtaaatgaacatcagtcaacagggacaataataatattacggaccaaataatgcctgttattatcctactaaaaatcgtcttcgttgtcaccatcagagaggatcaccacgaccacaagtcattggagtcaaagtaaacactgacaaggcgagatcacgccaatcccataatccggaatcttctccttttcgatcaatcaatctctttctctttgtcatctgtgaccatatgacacaagcagacaatgcagtgggggactctgctactgctagtactacacctctatgcagaaatgcagatatacttatactagtcagaggccaacttgtgcttctcatttctaagcattgggatgccaacgataaggtgggagag

SEQ ID NO: 73890 - DNA, 486 bp, Oryza sativa
  unsure (1)..(486): unsure at all n locations
cttcatcaatatctatatatttnttccatgacaatccaccctttaattntgcatctattttttgggctactatctcttcaaaagatatgtacactccaggaagctttccgtcaaaaacaacatatatgggtttttgctgtattacttcattattntctgatgttggcattatatcatttattagatggaaatattcagcaagactgtttaatattgatagcatatagcctttttcttccctcttattattgtattgataccagaaattatctaaaatgcattcttggacttcatctaatattatgtgggtttttggcttanacttataggtattcggtgggaatactttgagcttattgtcttctccanacgtgaagaactcaactccactataattcatggacttcttcattccttgcaaataggcaatcgcgagagtagatcanggtaatgaatatcttcttccttaatatgttcaaatataac

SEQ ID NO: 73891 - DNA, 445 bp, Oryza sativa
  unsure (1)..(445): unsure at all n locations
gagcttatatatctgctccgctgactntnttatatatagtcaaggcactgtttgggtttatcaagcaatttattggatacaatatcattgctttntgccacgtaactgtgcatttttattgaccaatattatggcttaggctgattatatatcttggtcatttttcaggcggttggtaaattctctatgagtttatttactcggattttacaccacgtatgccgtatatttctgggtgtggtgaaaccatgtgtcttttatggacttaagcacatctgttaaagcagtgtgcacatggcgtatgtccaatactttggaaatttctttattcacagcattcaagcttttttatagctgttntgctatatgacttttcaatgatgttgtcagctttatgttgcacgcattatattttacaaagctgtcggtatatcactcggatcat

SEQ ID NO: 73892 - DNA, 483 bp, Oryza sativa
  unsure (1)..(483): unsure at all n locations
tagacgctngatggtagagatggctctcaagccgcggctgctactagacatgagtaccaaagtctctgggggagaagagttagacaaatctagtaattcgtgttgacttgtgctgctacgaatagatatccggagaacaaccccgtgttacctccacctcttattgagctgcaatgcttggtacgaccatcccatcgcctctcataccacgcatccatctgataatcaatattatgtcactgtcgagacgacaatctgtagcagcccgctaccttgcatctcatgatttaatgagaaaaaatcaacagatttgctatatttatatcgccatcaaatccagcctctatattcatggagaatatacagagccaaaacacacacgaattgttatgccctgaacccncctgcacagaagaggaagaaaaaaagaaaagctaccggaagactgagcttcagtgtcatcaaagatgacataatctttca

SEQ ID NO: 73893 - DNA, 427 bp, Oryza sativa
  unsure (1)..(427): unsure at all n locations
agcttacttatttatattggntaacaattaccccgcaaaaaaatattggttaacaattgaacaaagaattgagaacaaaaacttagtagttggaacggaaagcatatgtctgtaggtgggagattggttttgaataactctgtgttatcaagcttagttatgtttatgaatttattttttaaaattcctaagggggttcttcgaaaaatagattattatagatcctgtttcttttggcaagatgatgaaagattgacaagatgggatattatttgccagcctaaagatcaagggggacttggtgttcataatttagaaatccaaaaccagtgtttactaagtaagtggttgtttaaattaataaatgaacaaagcgtgtggcaggatctcttgaaaagaaaatatctcggtactaaatctataactc

SEQ ID NO: 73894 - DNA, 387 bp, Oryza sativa
  unsure (1)..(387): unsure at all n locations
agcttgagatatctactctggaggacgagagaaaacattccacatttgagcatgaatgtttttctttcaaaatcccncaggattcatgctcacataaggaatccccagagtcctgttcgattagtaccactttcctgtgcgaggaccacaaccaccttccgattctcatttctaacttgtttaaaaggatggttgtagatgcttatatttatcataaatactgcaaatctcgtacttgtttgtggcactaatcttgcagagcgatgtcctcaaggtcgagcttgtgaccataaacaaagcactgccaggagataccccggattatcatggtaagttttctttccaacacaagcaagaaccagttnttaggatagtatgcacctttgg

SEQ ID NO: 73895 - DNA, 422 bp, Oryza sativa
  unsure (1)..(422): unsure at all n locations
agcactgtggagaggtaacccggattgctatggttagtttcccttctaataaaagcaagaaccaatttttaggataatatgcaccttcgggtattcttggtcgctaaacattgcaagttgagattaagaacgagagtcatcagatgcctaagaacacggtagctacatcaattacacactttggtgatccttggtattggaacaaactctataggagactccaacattacacacttggtgtttgatgtcttgtgacacacaagtccaagtgtggtggtgaatgtcgatgagcttgtcataacgagttccatcaaccaaggccaccttggtttgaagttggggttagtcctagcttgataaaacaagacaaaaagaatataaagacgagaatgagagacggancgagataaaaaagatgggag

SEQ ID NO: 73896 - DNA, 401 bp, Oryza sativa
  unsure (1)..(401): unsure at all n locations
tcatcctatccccaagaacccaaccacacgtctacaccccctcttcagaacacacgctttttcgttggcacgtcccaactccaataagccacataaatgctaatagtaccaattgcacgatgaacttcatgaatctacttacggagtactacgtgataacaacagggaaattagaaattcattttggagatggaaaatcaaaatctagtacgatactactagcaatccattntctataaagtagcaattgaatggaccttatatggcattggtcgagccagaaaatcttcatcagatcacacgcggagctgaggctggtgcccctctttcccggagtagtaccactctagaacgaaagttcatacgtcaccgacagtggtattcacagaaaacgtctaatc

SEQ ID NO: 73897 - DNA, 493 bp, Oryza sativa
  unsure (1)..(493): unsure at all n locations
actaagcttaactctgactggactggggtggctctgactgctttttttcagaaagaatatngtaattagggcatgtttagatcctctaataaaaattttcaccctatcacatcgaatatttagacacatgtatacattattaaatataaaaaaaataactaattatagattacatgtaaattgcgagaaatcttttaagcctaattgctacatgatttgacaatatggtgttacagtaaacatttgataataatggatcaattaggcttaataaattcgtctcgcagtttacatgcggaatcctgtaattattttggtattagtgtacgtttaatactttaaatgtatccgtatatccgatgtgacacgctaatactntatacccatggagttaaacacccctctagtgaagtgagagagcatcgactctctgtcaggtgtcagatagctaaatggagagaactgaagagcgaatatgcttgtcttcagttat

SEQ ID NO: 73898 - DNA, 399 bp, Oryza sativa
  unsure (1)..(399): unsure at all n locations
agcttttatggaacaaggtcacctagttcttgagttggtgaagtgcttttggcacttttctccaacttgcacagntaaaccataggaggagagttttcttggcacattttgtgactatggatgatgaagttcacctaccaattccaagccaccttctgttttcacatcccgagatctcccatggctttgatgaactcctaaagaacacaactacgtgtactcactcacacacttgcaatccaccgggtccatcagttgctatgcatactcacacatgcctccacacacacattcaagtcatggcttctggtgaaaacaatgttgaagaggagctgagaaagacccgtaagcctctgggaaatagagaagcagtgcgcaagtaccgagagaagaagaaag

SEQ ID NO: 73899 - DNA, 411 bp, Oryza sativa
agcttgtgtttgtgtcctcacaccttatcaatccttggaaatccttaaatgactcgtcctcttccaatggcagcgtaacctcaagtgacctctttaccttgaggttcgtttcaccatcaaggttcattgtctcgacgtagcaaatgccatcctcataactcgaggacagcagtagtaaatcagcatggaagaactggtccttctcaaccttgaccacatcaccaacagcaaggtcctcccagtgccggtactcgaattcgccttcgcccttgtggacggcaaccttgcggttgttcactttcatgtcctgcatgaatcgccgccagtcctcgaccccttccttgatcatactaagcccaacaacaaaagccagcggcgcgatcatgctgacggcggagaaggggcacaccg

SEQ ID NO: 73900 - DNA, 442 bp, Oryza sativa
  unsure (1)..(442): unsure at all n locations
tgagcggctctgctggctctgcgcttatgtcgatttgatgttgtcatctcgacagtttatggtcgacgatgagtaagcctaggtccatccttcctccgttcattataggttaatagcactagcagggacatggcttgttcatgagctcattaattagtggtggtgagtgtggatatggaagtagtgagtttcaacttgaggacatggagaagatctcatcaagtggctgatgtatcaatcaggtccaatgtgcaacaaattgtaagtccatccgattcacagtaaaaatataagatgagacctagtccattatgcaattntggtaaagaaatctagtccaaactgtaattaactcaagtttttttttaaaacgtaatatctgtaaacattaaacaacaatctttaaatcttttactgtattatcatatagtagatcactgtc

SEQ ID NO: 73901 - DNA, 373 bp, Oryza sativa
tgcagcttttttttatacctggtaccctgacatgctcctgctctgcagagtaaccggatgtccgcacaatgctgctgcaacgatctcactctgatatcgaatggaaccatgataatggggctttcttgtttggcaatgctatatatgactatgattatgagaaccattgaccctatgctcttcatatgaattggcatcgacaagtttttaggtctatgctctcataactggattgcttttgtactacttactgaattctaacattgtttctttgaaatttggatgatactactgtcctccttatctcttcattgacccaagatccctaacttatatatatattcgtacgcgacaaagctatctgtattgcata

SEQ ID NO: 73902 - DNA, 485 bp, Oryza sativa
  unsure (1)..(485): unsure at all n locations
ctaagcttgtaccatgtgcgtgccgtcgccgcgcgcgcatgcatgtcttctcgggggccatggcagcgtatcggacgatctatcatatgggagcggatccaagaagaaatagtagaagaggactgaacaaactgtataatgaagacgctcgattgcgagaatcgaatccaacccaagaaaaagtagtaagagaactgaacaaactatataaatgcgctcgatcgccagaatcgaatccaagaaaaaaaagagcaagagaactgaacaaactatataaagacgcttgaccaccagaatatatcgaacctaagcaaaatagtaacggtgatctgaataaactatataaagctacaagccctcgaaaaatttaaaagagcccagtcccatgatcccgccatcacgggtagtgtgggctcgagcacnccgggcattcccacgacagatcggcccctgttgatcatcgatcgagctatcgatatgcaagt

SEQ ID NO: 73903 - DNA, 69 bp, Oryza sativa
ttgagtctgctgtcgctgcagcttctttatagccctccaccctacaaaggccacgactatagcatgata

SEQ ID NO: 73904 - DNA, 379 bp, Oryza sativa
agcttcttatgccattgcttaagtgcttgcttgaggccatacaaggatttcaatagtttacacaccattccctcctgaccttctagtacatacccgcctggttgatccatatagatctcctcctccagctctccgtttaagaaagctgtcttaacgtccatctgatggacgagaagaccatgagaggctgccagagcaagtagtactcgaatcgtagtcaagcgagcaactggtgaatatgtgtcgaagaaatcctcgccttccttttgggtataacccttggccacaagccttgccttgtacttttcgattgtaccatcacgcctaagctttttcttgaaaacccatttgcatcctacgggcttgcacccatatggac

SEQ ID NO: 73905 - DNA, 377 bp, Oryza sativa
  unsure (1)..(377): unsure at all n locations
tgcccgcangcacgtcgaacacacacttatcggngttatttttattcgggccgagcggagactttcgaaagtttccgctagatccgagagtaaagtctcttggttgcgcgtcttcacaaccaagtcatcaacataggcctcaacattgcgtcctatctggctacccaaagaaattcgagtagtacgttgaaaagtatgacctgcattctttaacccgaaaggcattgtcgtataacaataagttcctatggngggaatgaatgcagttntttcctcatcctccctagccacgcgaatctgatgataaccagagtatgcatccagaanacacaaaaagtcgcaccccgcggtggagacgacaatctgatctatgcgtg

SEQ ID NO: 73906 - DNA, 443 bp, Oryza sativa
  unsure (1)..(443): unsure at all n locations
agcttggtaacgatgaccctcaactggcgtctcggcaacgtgacgagggtttggaggtggagcattttgagagagcgtcgggtgaaaaccttgcctaatgctaccctatgctgacgttatcgacgcctgtgggcgccgtttcctcctttgaggtatcgtcaggctggctctctcttccttcatgtgaaaaccaagttcctttcaggacgagcgttgacagcatccttggtgttgttcccttgttggaggcttcgctcagaaggtttttactccactggtgattgtttggtggttctggagacctcgtttgcattatatgttgtcgaagctgcttgccactgtaagctcggcaacgacgacttttgtgatatctcaagtagttctttctttttcctttccctttctgatattntttgccgggttctatttattaaccatgtatg

SEQ ID NO: 73907 - DNA, 424 bp, Oryza sativa
  unsure (1)..(424): unsure at all n locations
ctatgaaactcagcttcggaattctgattatacatttatcanaataatcacattcactntacaatccatccttaacttcggcaggcaagttagcatcaaaaacaggcatagtaacctcttcctcatcaaaaccatgatgagaaccaccactactttcagaacctccagatttaaccatgatgcaaaatctgaaatttagcaaaataactcaacagtaccgtgatgaaccacgctctgataccacttgatgagcacccaacatcgagtaccctaatttatctctctctttcacggaaccaaataaaacagctatcaaattagttcagaaaatatgatgacgataaaccaaagcactcagaatctaatccacccgtgctttcacacatgaacaggagaggaggcacacacgtaccaagcaacaaaa

SEQ ID NO: 73908 - DNA, 419 bp, Oryza sativa
  unsure (1)..(419): unsure at all n locations
agctttttatttatggaagnnaacccacactatcttgagcgaataaacaaccagagctgcatggtacaaacatcatggttagacactatcaagtttaaatctaacgcgtaacagtataagaactcctcataaaaatgccacactgatcagaaagatgaactgaaactacctgcccagtattttgtcacatcctgattctcgtcttaggatctataaattatttaataaatcattattagaacttatattaaatgttcattaatttacaagtgaagttaaatgtgagacataaaactttctaaatataaagcatggctggatttatattctattaaattcttcattggttattatactctctggaattttctcggattcttcggagctcaatctctcattntaatcatacaaagaacatt

SEQ ID NO: 73909 - DNA, 456 bp, Oryza sativa
  unsure (1)..(456): unsure at all n locations
tggcctaccttagataaaaacatagtagtaatttctacatattataaacatattatcgaaatatattccatgttatatttaataaaactaatttgatatttcagatattgctaaatttttctataagtttggtcaaactttattagtttgactagaaaaaaaaatcaaacgacatataatatgaacggagggagtagatctcttcatgacgaattgatgaagtacaataatagagattactacctccgtattntaatgtctgacacagttaactctttatcaaagtttgaccatttgtcttattcaaaatttttatgcaaatataaaaatatttaaatcatgcttaaaaaatatttgatgatgaatcaaatctcaataaaaacaaatgaatattagaatatttttttaataagacacatggtcttgcgtatttaaaacattcaatggcataataca

SEQ ID NO: 73910 - DNA, 364 bp, Oryza sativa
atgtcatatcacgaatatattaatgtcacatgacgtgttctgatactaataaaaaaactaattacataatccgtcagtaaaccacgagataaatctattaagcctaattaatctatcattagcaaatgttctgtagcaccacattattaaatcatgaagtaattaggcttaaaagatttgtctcgtaaattagtcgcaatctacacaattacgtctttattgacctatattcaatacttcatacatgtggttaaatggtccatgtgacagggtaaaaatttttgggccggatctaaatagtgccttatttagctccagttataaaccaagactaccacctactaatatacactgatcaaaactg

SEQ ID NO: 73911 - DNA, 485 bp, Oryza sativa
  unsure (1)..(485): unsure at all n locations
tgtngccgtgagttataacactatacacattacagagtcttttatactgtatacgagcggttcaacttccatgccaacgatggttaggccgtgttcagatctaaaatttttctttgaacttttaactcttttatcacatcaaaactttcctgcacacataaatttttaaatattttattacatcgttacaatttcgactaaactttcaattntagcgtgaactaaacacagccttaaccaattcacgttcggacgttcccactgtggtccagaggcctagaatccgtatccctacacaaggcgataaacaaaggcacaaacatttatntgaccggatcagtgagcgctcgtgctccctccataaataataaagagacaaactctgggtgtttttgccaaattaactgtctctctatatgaaattttttataattatattttattgttgtagatgataatatgataatatttatactgactgcttt

SEQ ID NO: 73912 - DNA, 336 bp, Oryza sativa
  unsure (1)..(336): unsure at all n locations
ccaaaacactcataatnttttattaaaagaagtgtccggagggacatctgtccctccaaatctcgtcttttttttacttaactagcttagggtagggttaaaaatggttcagaaaatatctgatttcatacacatgtttttagaaatggaaaatatcgggtagaatttttttttttggaaattttggaaacagaaataaattcagattttttctataatggaaacgaatacggttaggctactatccgatgaaaactagaatcgactgaaaactttctaaaaacaaattaaaaaatgaattcaaaacgttgtagtattgacaacgtttgcccgtgt

SEQ ID NO: 73913 - DNA, 403 bp, Oryza sativa
  unsure (1)..(403): unsure at all n locations
tcaccgctntgagtaatccacgatgtcagaatagggggattatctgtgaaaatggaaatgaagatggagcgagcagcaagggaacttcattatccaagggagctactataccttttgattacagcaaacttaccattccccctcacaactttgtctccgtgccttccgggcgtgctcctcaatttgatgggacacattacgccgcttggaagcacaagatngaagtgcatctaatctctttgcatccaagtatttggaaaattggttgtacaggtgttgatgtaccccatgatgacatggagctcacttcggagcaagagcaactcatccaccgcaatgctcaagcttccaatgcaattctctccgccttgagtccggaggagttcaacaagtttgatggtct

SEQ ID NO: 73914 - DNA, 344 bp, Oryza sativa
  unsure (1)..(344): unsure at all n locations
cagcttgctttatatctcctagttcccgtgacttgctgagtaccaaagtactcacccttgctccatataaatatatatagatcctccgccctgaagagaagacaaagtgaagtgaagattatggtttcgtcctggttcccaaccgtcgtctgtggtgttgggtgttagaccgttggttccgctgccgctgttgntgttggtgttcgcctcgtccgtgttgtcggttgtattcttcggctgtctgagctgcnacctaagttaaggtaaataagtcctctatttatttaaagattgctatgattcatattntgcaccgtgggtaccaacactatgtcctgggactg

SEQ ID NO: 73915 - DNA, 457 bp, Oryza sativa
  unsure (1)..(457): unsure at all n locations
taaacgatggcagaatttgctcctcaagtgctatgattactgttcttctcagaaccagggctgggaagcaacgattcaacgagggctgctntcccagtctgggcaaatagcaattagataaattcaggctttagatcagagcacacatatgaccggccatatgccaggtttcaacttttgtaattgccagttatatatagcgtgcaggcgagatgacacctctggcanaataacaagacgtctatatatgacatgtntttgataatgcagnttctttacaaatttactttgaacactcaactttcttcaatttccctttgtgatcttnnttttttgcgggggccctctgtgatctaatataatggtagagcattgtaaaagaaagcacccttcaatcaagcaccatccgtcttatataccatagccacattttttattttgtgactaagacatcatg

SEQ ID NO: 73916 - DNA, 439 bp, Oryza sativa
  unsure (1)..(439): unsure at all n locations
agctttgttggttaaccataatatctaattcacatgttattatgttattaaagtacacggattcttagaaattaatgcttaaaaattaaaaatgttggactcaaaacctagaatgacaataatttgaaatggaaaaagtagtaggctttatttatcttgaatgaagacacaaaaggatgaanaataatctattcttaacattgagattgagatcaacattaaccttttcttgagttattntgttattagcatggcgtgtaaggtgagttcaacgaccacattcacctaaagacatgttagagatcaaggtcaccctaagcgatgttgaggaaccaaatngattgttctctcattatttattaataacaaggcaccaacaatgcaatttggtcagattatgttcctcatttgataaattagattgattactttctgtagt

SEQ ID NO: 73917 - DNA, 400 bp, Oryza sativa
  unsure (1)..(400): unsure at all n locations
agccacacattggtcggntcatcanaactctgttcttgaaattggaggtattggaggcaggagctaacactaagttgcctgaatcaaggataactccaactgtggagttgacgttattagtgatatttgtggcccagatcaaagacctggcctggtcgaacaatgccaaattgccatcttctgatgctgtcaactgtgataagtttggatcagagattggagtcgcccgatttgctatccagacgggtgtggtctttgagatcttgttgtaccaaatagcaaggtaccatctgttaggcgctctatcatctgaattngtaaccactgagattataatagttttcaagaatgcactagacanagacttctagagcttagagactattatgtgtatctagaa

SEQ ID NO: 73918 - DNA, 452 bp, Oryza sativa
agcttagttttatctcctatacaaccatttataactggaaaattttaagggttcgtctctgtgcaagaaacataaattgcgcatgatagtacgtgattttcaaacttgcatataaagatcatctttcaacttctgctcaacactccaaatgtagttgggagtaaattagacggaagaacttctgtaaacttggagtttagctagaaaacaaacaagttgcggattctagtttatgctgtgtcagtgataatgaaagaaaagacttcaaaatgacatgtatttggccgtgtatttgtacagaccatagacaacgtattagccagcacattcatgatgagatatgcattatgccttaagaatagctctcaattataatttgtccaccactggtctcgtgcattcacacttcataatctcaagtctttatctactagctatttgtgtgctactac

SEQ ID NO: 73919 - DNA, 495 bp, Oryza sativa
  unsure (1)..(495): unsure at all n locations
ggggcagcatgagccagcagccttgcagggtagtctttgttctccctggtggaccatgcaatagcaccccacggataggtgatattccaagtctatcaaatgaagcagcatgcttgatgggccattcaacagcttgctgaagttntttctgaagcatagcaacaataaccattaaaggaggtttgattaaagaaatcctaaaatgaggcatattttaccttaacagctttcaaacctcctatatcatcccatgagacagctggaatttctttagttacccctcttgtcacactatttttggccacagatttagcagactcccaatcctccatgattagcgttagcacattctcactctctgatgagctngataatctaccataagcacgtcttgcagcttctcgacatatagctngtaaatcagctccaacataaccattgcaggatgcagcaacagatngaagatcaacacattcaccaagatgtagattcttg

SEQ ID NO: 73920 - DNA, 443 bp, Oryza sativa
  unsure (1)..(443): unsure at all n locations
agcttctttccagaatgaggtctctactgaagtattgaaccgaccttgtgttcctacattacagcagctgaagaatgtaacagaagcatcggctgtaggtggccattggccctatgaaactgtaaaagagaaagcgagtgcttgtagagattctggaatatttaaagaactaaaatccggtttctcttctggattctccagcgatgttgtgaccaagttttctgcatcacctgaattgaacaagtatggtcttgaacacaaaaatcttgtgtttgatgaagggtcacgaattgagaaatgttcctcatccagctatttgcctattagtacaggatgtgaagaagcccaaaatagtttttctagatttcacctggagccatctttagtgaagcacaagaataatcaaatttctgagggaagtacacgganagaacatgagaatg

SEQ ID NO: 73921 - DNA, 416 bp, Oryza sativa
  unsure (1)..(416): unsure at all n locations
tatctagtagtacctaattaatgtgctctcagtattttattgtgattgcattccatgcttatctctggtggttgtttaagtagcttagcataagtaattgcaatggagtaattagtataatgagccaggagtactttattatatgactgctcagtcagtttcacataaaaaaaggagttctcaaaaagtcgagtgtctatttttatttcaaacttctagtttcatcttgagactgttaatatggctgtctctttctatggattttcagcaatacaattgtcaggataattgtgttagctatgttcatccctttggtgtcatagatcaaattttccttcttggaagtagaatagtcatattcatcctttgatttcgtcctacaagtgttagccaaaacaggagaatngatctttata

SEQ ID NO: 73922 - DNA, 357 bp, Oryza sativa
gcttggtcctgctgctaaatttcttaacgcagtccgtgatatcccatttgctcttacaagagtacacacaatgctgtacattgctgactttgaatcacacgttaattacctgaagaagtgctttgagacaccttgaggtgagaattatcgttttcgacttgtctttcatacttattattatattgacctcttacctataactcactacatgatacttttcttaacagactgctcgtgacgagcttagaaacaacacgctgtttctgaagctacttgaagctgtcctgaagactggccacaggatgaatgttggaacaaatcgccgcgatgcacacgcattcaagcttgatactgtac

SEQ ID NO: 73923 - DNA, 492 bp, Oryza sativa
  unsure (1)..(492): unsure at all n locations
ggcttgtatctgcattggtaggaaaggaagtatacctgtcttcttctccggtgttgaaaagcataacaagaacgggctataacataacatggaagaaagaatcctgcgaactgaagagttgcctgaaaaggaaggaaagatttagtgcgagatgaaagaaaatacatatttcagttcttcacatcctanacagactgaacaaaacatacaaagagataaaaagacaatgctggaaaaacagttaggtcaaattgagcttcattaactcaagtttaaagagagagagagagagagagagagagagagattcctgaacaaatntgaaaaataatgtgaaccagggttttgctctgtatttctaaattctgaacggagaaaatccatttcaagtttttggtgtgcctttggcaaccaatgatgaacatggctntntcagcaattaattattttgagcattgngacaccccacaggcccaaacagagagtggatca

SEQ ID NO: 73924 - DNA, 436 bp, Oryza sativa
agcttctattgggccttccagtcttgtgaactgcacaaaaggtgagcatatgatcaatgtgataaccatatctgcgccaatgatcagatatattattcaccagcctacctactgtttgtagaacttctagtttcacaaattacaaacctagaatgcagcaaaccctagttccagtaccagcctatgcaacatatgaacacatatttggacaaaaaacattcagtgattgccactacggaatacgaaattgcagtgctcacttcgcaggatgctgcagggaaagcatatgtctcaaactgcatttggtccaatttcgccacaaaaaaattaaacaaacaagccacccacaacactggtccttaattcatcccttgaagttgaacatcacataatctatcgccaaactctaaggcctacgcgtctcacggtctcacct

SEQ ID NO: 73925 - DNA, 431 bp, Oryza sativa
  unsure (1)..(431): unsure at all n locations
tctaatcgactggtctcttaagtcttcacactctgccttattgcttgatgtttgncataattgagattntatcatcctgtattccatgaaaagttataatgcattatttgttttgaaattgttttggtttgtatctagaactagttgcacataatgaggaagattaccagaactatcgtanggctgcgaagcagcattgggatatgatgaagcaatactatgagaaggtatgggggcttcatgatgattctttatgctttgatgtttatttcgttttctgcaaacagatcgttttttgttttttccatgttgaagaattntcaatgaaaattccaggctgttgatgcttttatggagggtaaccagaaagaagtcgagtatcttcttgtggaagtaagtaatcattttcttgagcaagaactataggacat

SEQ ID NO: 73926 - DNA, 416 bp, Oryza sativa
  unsure (1)..(416): unsure at all n locations
agcttgcctnnnnnacacacaatntgctgcatttaatttagacactgtgcatatacaagtttgctttagttcggtgcaaggttaatcggcgggtatttgcttaacccccgtccgagtagtcttgtattcttgctctttgttgtagctatgaagaaacaactttcgggcatattcaagagacgatcaagctcactgacaagccgacatggtaagccgagtacaccttcttccacggatgcatccatggaggaggcgcacattccaccaaggctgtacgacaactccgatctcgacctcgtgggcgactgtgaaatgcaagtctatcatatggtgaaagaccaaatgtgtgctcagacctgagcatacgactcgaccttcttgaanngnnnngnntggatgctgagtttcatactatt

SEQ ID NO: 73927 - DNA, 397 bp, Oryza sativa
  unsure (1)..(397): unsure at all n locations
nggcacaatttatccaaaggatttcactgaattagatatatatgatttgcacaatttatttcatttgtcatgtaattcattcaaaccatttataatttagatatctttacttttgtgctactgtttgtacctttaaacatgtcattgccactatgttgttatgctattatttatactttaaattttgccagtccaatttttttgagttctgtaagattntttttcaactttgaataccctttgctgaaatcctggctccgccactgaagcacgcggtcggcggagcagagcggcagcagcgggcaagcagcggccgcgagccagccgccgggccttctcctctccctcatcngcctgccgacctcctctcgatcccagatcgacggcggcgagatgc

SEQ ID NO: 73928 - DNA, 436 bp, Oryza sativa
  unsure (1)..(436): unsure at all n locations
agcttataccctaccgattatgccctatgttggtcctacagaccagagacacaccaagggtctatactaataagccatgacacctattaacaaaaaaatattttttgtacataaaactttattatatgtgctattagcgacttacaagccaatgctagaatataaaatacaatgaaaaataatataaaaatgaactttaaatttaggttgtaaaactcaaaatatatttgggcatatacgctgaagagcaaacaatagagttgccaaaagtttaggatttaaggttntgtgtattttataaaaaaaaactgatctactttcattttatatttcaagaaagcatgggttatataacattctaagggatataactaatagccaaatatatattattacaattaatacgtatgttgagtatatatactcctttatttaa

SEQ ID NO: 73929 - DNA, 406 bp, Oryza sativa
  unsure (1)..(406): unsure at all n locations
ntactcanatttcgaactgaagttggcatctgtcttgtatttgttttattngacctacattgaactgagactgcattgaacattgatgacattatttctgctacaccaacaatgatggcatcaaaggtcgaatttgctggcaaagaggcacctaattntctgcaacactaactagaattttctcctagacaattgctgtcagtaaaggactcatgatttgcaacattccatctgcatacaggttatctgttacggatgttatgggatcaaataccatatgtgcaggagacattggcatggtgcgttagatatgttcataattctagtcctagcttgattaatgattctattngatattcctacgttgtgtcagattccctaattattagatgccacctagtacata

SEQ ID NO: 73930 - DNA, 446 bp, Oryza sativa
  unsure (1)..(446): unsure at all n locations
agcttggtcttctcttcgtgcataagctgccgattgtgctggattgtagcttcaatgtttttgcgttcccggcgatcggctaatctctacttggccttctccagcttgaattggtgttgctcaaggtaaacggctggagtaaaggcatcggttagttcatccgggagtagagcttggatatctgtgaacctggcctggatcgagccacagntggtcactaagttgtctaatgatgcttctagccgatgagagatatcctcgagcattctcttcacatcatcagacagaggagctacagctttactggtggtgtcttcctctatttcatcgagataatccttgatgtcgaaagaaaacatatcggctaagaccctgcagagataatantatggatgggtaaggatcaaaacatgaatggctgatctcagatttgatcaacaaaactt

SEQ ID NO: 73931 - DNA, 344 bp, Oryza sativa
tatctcttacgctccaggaatggatcagtcagatcatcacttacggcttgccttcgccgcggccgactagtgtcaccgcctgcatggctggcctattgtgccgccgttgttgggcgtttacgtcttcaccgccggcttgccttcgccgcacgcgactggtgtcactgcctgcacggctggcctattctgccgccgttgtcgggcgtctacgtcttcaccgaccggcttgccttcgccgccgccgactggtgtcttcgcctacacggctggcctattatgccgccgttgttgggcgtctacgtcttcaccgccggcttgccttcgccgcacgcgactggtgtcac

SEQ ID NO: 73932 - DNA, 325 bp, Oryza sativa
agctttgttattataaaacatgtgtaggcgctagcctggaaaagacaggaaggctgcgccgttgacatgcgcactccacatgtcaacctaagggaccaccgtagaccgagtacacagagacggttcacgggtcgacggaagtggaccccgtgtgtcaaccgaggcgagtggctgacaaacgaactccactaaacaccacgcgagctgcacacgtggaaaccacgcggctaccgagcgggcacactaacacggtcaccacacgcacaagcgaacgactaccgacaccggtacacgggtaccggggtcgacaaccgcacaacgggta

SEQ ID NO: 73933 - DNA, 459 bp, Oryza sativa
  unsure (1)..(459): unsure at all n locations
tggaagtgtgtgtgaaagtgaagaaagtgaagtctatttatatgataggtatgacgggtggaatgatgcgaattgtctgaactgcccctcaacagtcatcangagagcatctggagtgtccacaccaaaaccaggatccaacgacattcacctgtgttcggccaaaccagggctgggccagatggcctccaaacctggtctgggcctcctcctcgtcctgccttatccaattcttgcaattttggctatttctttggtagtttaaaagcccattcttgcatggatagatttctccttcacttttagtctggatttccaccctacttctgggtttatcacctgcatacaatatacaccaacacttgtggaatatagtaaatttacccccgtcactatgctggatgtttattatgttggcggataaatggcacataacagcaccaacnaacccctcacact

SEQ ID NO: 73934 - DNA, 325 bp, Oryza sativa
  unsure (1)..(325): unsure at all n locations
tgatagttggacaagattagaaagagcagaaggaattggaccttgaaaagaattgccttgaaaccgcctacagatcatagctgtaactagtcattcaaatcatcttttttactgaaacatcaaactagaaatgatagcaggaagaactctntgattaaaaaaaggaaactaaactaatgaagctaaagtacagattctttcacggtgaatacataaatattgtaaaatatattcaaagctgaataatgcttttcaagaatggaagccatctcatcatgaatagtgacagaagaaagatgcatcatttaccaacgctcaacaatca

SEQ ID NO: 73935 - DNA, 467 bp, Oryza sativa
  unsure (1)..(467): unsure at all n locations
ggatagttggacaagaatagaaagagcagaaggagatggttctttgtaagaatngccttgaaaccgcctacagatcatagctgtaactagtcattcaaatcatcttttttactgaaacatcaaactagaaatgatagcaggaagaactctntgattaaaaaaaggaaactaaactaatgaagctaaagtacagattctttcacggtgaatacataaatattgtaaaatatattcaaagctgaataatgcttttcaagattggaagccatctcatcatgaatagtgacagaagaaagatgcatcatttaccaacgctcaacaatcatccaaacttaaataaagagacccctatagggtgattcagcacagtcaagtaaaaagatactctagaaacgagaaaaacaaactatctttcacanatcacatgagccaagtagctttagaatgcatctcatgttcacacctac

SEQ ID NO: 73936 - DNA, 282 bp, Oryza sativa
  unsure (1)..(282): unsure at all n locations
actgtatacagttcanaaattgcgaatctaccttccactgctagttctgatttactggattccttgtaagctaccaccaccgcacttatattctaaattataaggattgctgatacgcacatgcaatctatctatctattatatactaaaaggtcattaaacttcctcaaaacgctctcaagccgccatatggtgctctaataaactacttcctccgtttcacaatgtaagactttctagcattactaatagtcatatatatgctattagacgtctcgccta

SEQ ID NO: 73937 - DNA, 461 bp, Oryza sativa
  unsure (1)..(461): unsure at all n locations
atgagataattgaatggatgtcaaatggagtgtttttcatagtctaccttgtctccactggctgtctcccattctgtagaaaccttcttgataacagttaaatcttctgcttcggatttttgctctttttttatcatgttttttcttttgaagaattcttcgaagtgtctgacttggctactttcataccaatcaaagaaaaagatgttcttcctttgttctctcatttctttatgccaaagntctcttatctttagtctaaatggttcatcgaccctttcaaagtatcttttcatcttgggtcggttcttttgaagcctgagttctcttttaagcaaatatttatcaatttcaaactcatcttcttctattagcataacaaagccaacatcaagctcgataacattgatatcaagtctgagatgagagtcgcngagttgcttctaggtgcatgacacatt

SEQ ID NO: 73938 - DNA, 362 bp, Oryza sativa
  unsure (1)..(362): unsure at all n locations
gctgctttttgttcccaaaccaccttatggggttagctttatggggcggagcggaagtctcaaaanttccgctagatctgaagaaagtttcttgttgcgcgttttactaccaagtcatcaacataagcctcacattacgtcctatttggctacccaaagaaattcgagtagttcgttgaaaagtaggacctgcattctttaacccgaaaggcattgatgtataacaataggttcctacaggggtaatgaacgcangtttctcctcatcctccctagccatgcgaatctgatgataaccagagtatgcatctagaaaacacaaaaggtcgcaccccgcagtggagtcgacaatctgatctatg

SEQ ID NO: 73939 - DNA, 399 bp, Oryza sativa
ctaagctttgccaatataaaacaggtgttagcgctagcctggaagagacttgttgctgcgctgttgacatgcagaccccacatgtcaacctaaaggaccacggtagaccgagtacacagagacggtccacgggtcgaccgaagcggatcccgtgtgtaaccgaggcgagtggccgacaaaccgactccactagacaccacacgggttgcacacgtggaaaccacgcggctaccgaggcgggacactaacacggacactacacggtcaccacccgcgcgcgtgaacgactaccgacaccggtacacgggttccggggtcgttaaccgcacaacgggcacgggcgataccgataggacgagaacggggcagcgagaggacggatccttaccaccacgcgac

SEQ ID NO: 73940 - DNA, 435 bp, Oryza sativa
  unsure (1)..(435): unsure at all n locations
agcttattttattctgtcaaaaacatcgtacccgtgggggctcaacatatgccaatattggcattaattgacaaaagttcgtcgcgcgaatcacgaagggagtttttgccacgaacgcacccaatacactccaatatgtccaaaaatcatgtttggatgctttttgaactttttcaatccggtcaaaaacaacgcacccgtgggggctcaatatatgccaatattgatattaattgacaaaagttcgccgcgcaaatcacgaagtgagtttttgccacgaacgcacccaatacactccaatatgtccaaaaatcatgttttggtgctttttgaactttttcattccggtcaaaaaacatcncacccgtggggtctcaagatatgccaatattggattaattgagaaaattccgctggcgaatcacggagtgagtt

SEQ ID NO: 73941 - DNA, 415 bp, Oryza sativa
  unsure (1)..(415): unsure at all n locations
tganactngngatgaatgcaaaatactgatgagaaaaagatttgttgttttatactatagacgtgctctccttgagaaatgggaacatctaanacaaggtgacaaaactgttagggagtactttcatgattttaaaatttgtatcacttatagtggtttacaagaatctaatgagaacacaatgactagatttttcagagggcttaatttcaatattcaggctgggcttgttaatgtgacatataatcatataggccaattgttcatgcttgcttgcattgttgagcgcaaaattttggagaatccaacggagcaacaagatatgcttgtgcctcctatcactgatgntttgaggaagttcagaanagctccaaaatgagaagaacgactatgttgagatgtcacttccatcact

SEQ ID NO: 73942 - DNA, 59 bp, Oryza sativa
gcttccaccggaaactgcggcctctgattttgatggcaagcaacccttgtgcatcttgc

SEQ ID NO: 73943 - DNA, 451 bp, Oryza sativa
  unsure (1)..(451): unsure at all n locations
agcttattcttacagcaatcagctaagccagtagccaatcctcactcactactcatcttctcttcccatctttggtgcttgcattcagagatcatccaatcggccatggctgatgaaatccagcatctgaccagggccttctcaggttagtaaacttacaaccattcaattcttggacacattcgtgtgtgcatttatgctgctgtttcatattgttttgtcttgcaaatgcttatggattntgtggatcgatcgattgatcaatgaagggctcggtggcctcngcgtggacgagccggcgatggtgtcggcgctggccaagtggcgcaagcagccggagaagctgtccgggttcaggaagagcttcaatggcttcttcaaagatcatggcggcgtcatcgagaagtgcgaggaggagtacatgctccaccttcgcgcccgagtctcgcgg

SEQ ID NO: 73944 - DNA, 409 bp, Oryza sativa
  unsure (1)..(409): unsure at all n locations
ngacttctttagaaaaactcttcatagtagatggcattttcttcactggtgtaccacctgaccgactgtcagcaaggccctctacagatggaggcccatgtaatttggaatacttacagattgatcgctgccccaacttagtggtattccctacaaacttcatctgcctacggatccttgtgataactcacagtaatgtacttgagggcctgcctggaggatttggttgccaggacactctaacaactctcgtaattntgggttgcccaagttntagctccctgcctgccagcattcggtgtctttcatatctgaaaagcctagaactggcaagtaataacagcttaacctccttgcctgaagggatgcagaatctaactcgctctcaaacactacattntattaaatg

SEQ ID NO: 73945 - DNA, 429 bp, Oryza sativa
  unsure (1)..(429): unsure at all n locations
agcttgtttatcatgatgcagtcacatattgtccatttaggccgaaagcccgttaatccgaaggcccaactaataagcacttaagcctatgtaagccgactatgcccataaagagcagtacttctccagtacaaaggggataagacagaactaccctcacgacactttgttggtaaccagaattttggacgtaattagcgcaaactgttaggcccaaatgcgtcatttcgtaaataaaaggaaataattagtgaggccgtgctctgaaaatggaattaatttagtgtatgaccgtactgtatagcagagcagcagcctccgggcagacgagagccaacaggcttgctcttggcggctatgggtttgtgtgccaaaccctaatccncttccttgcatcaatctcatggcggcgatttcgtcggngatggt

SEQ ID NO: 73946 - DNA, 358 bp, Oryza sativa
  unsure (1)..(358): unsure at all n locations
tcttgatgtcctcaaccagacaaccaatcttgagcgatcctgtctaggtgagtttagcttctgaataaccgaaagacagtcggaagcaacaatgacattatggaagccttcttctttggccagccacagcgcatgccggatagcacaagcctccgctgtctccggatcggtgatcggaagcaattgttatgcacatgcggcagcacacaaccggcccccgtacaagccgatgtatgaacggaacatttatgtnttgtgttattcgtggttcaataacaaacaaatgtataaaaatgagctatatatataaaaaatcgaaaaccaattctttnttttttaataaaaacatatatactat

SEQ ID NO: 73947 - DNA, 446 bp, Oryza sativa
  unsure (1)..(446): unsure at all n locations
agcttttattgtggaaatganttttcttttgcttatacctttaaaaatgcatgtttggcagttcaggcaaatacagccagccgaggagatagcaatattatttggaaaatttgacacttagtagaatcttcctaattaaccagcatgatctgtcaaaaatccttgttacaaacaagtttggaaatcatgtgttccaatgagataatagtttctttgatttgcttggttatatgcttgcataattgatctcggaccgctcaaaanaattacttgcttggtttaagccggctgcagcgaaatggcctgccaaatcagtttgtcatctttgttcaaagctaaaccacaatgatcagtaatcacgtataattaatccaattaagtttgagacagatccctgcttgttagcatattgagctcaaacgacatttgatcacttcacttttcgt

SEQ ID NO: 73948 - DNA, 354 bp, Oryza sativa
  unsure (1)..(354): unsure at all n locations
ctgtgcccaagccactaattgagtcaactaataatctcctaattacctgtcaggtaaaaaaaaacatcacagaagtacatcataagaagtattttcttaattttattaggcagtcaacttataatacagggactatttgaagaccattatgaagcaatttcactacactacaagccatccagctcattgttgataccaatgtaagtagttagacaaattattttaatgtggcttgagatgccaaagaggactggtcgctaattgacttgctaagcaggtcttgctactgctggtggctaatgatgccgcagctataatgcagatggcggnggaggaaaaggtcttaccttgcat

SEQ ID NO: 73949 - DNA, 378 bp, Oryza sativa
agcttatctggaatgagatctatgagacagtgtgtgagccgaagaggggttgcatctatgctccttacatcatgaagatgattgaggcaaagactgagatttgttacttcaaggacaaccagcacaagtctttccgacctcatgttccctcttcttcagccactccccctgccagggcgacacgtgcttctacctcagctgctccttcttcctctgctgcaccacagcgctctgagtcttcttctcccataaagaaggctctccgggctatcttttgcatgtgtgctaagacagctaataaggtgaagaagatagagaggcgtcagaaggaagattggattgcagcaggcaacgatgtctttgatatttctgatgatg

SEQ ID NO: 73950 - DNA, 351 bp, Oryza sativa
  unsure (1)..(351): unsure at all n locations
aagcatctcatatataattgattcaccatttgtatctactgccattagttgacggctaagaactntgctgtacaggagtatgtcagcagctactgcagaaaattcgacaattcgagcagctagctgagcttgacgcatccgatgtggatgacgccaccttggccaaggaggatgttgtctgccacgtggcggattccgactccatggaagatgacaccgaagaagccgttgtgcaggacctggtcgaccttctagaagcaaactcttctgggtccacccgctgcttccagaagcttctaatagatttcttctacgacgggttgccaccttggcagggagaaagattggacg

SEQ ID NO: 73951 - DNA, 455 bp, Oryza sativa
agcttgtcttcatcagcgggcgattccattccacaggcattcttgacggcagcgacgaaaccaacctcttctagacatcttcaactgagaaggacttcaactctggtgtgggggaaaagagagcaagactgagtactacccactgtactcagcaagtcataccggaagaggaggtatgatgcaagatatatccaagagaggctaaaggttcttttgcataaagccggcatttcagagcagcagttggaagcagtaaaacagttgtagtaattaatccatattaaccaatcactgtccaacgttacaccacgttgcaacaggcccaaaccaccacctgaaccaaccagttccaaaagctaactatggtgaaactaatcacggtgaatctggtcgaccgcccataaccgcgggcaccgctattccaatagttttactctgatcagaggtgtacaact

SEQ ID NO: 73952 - DNA, 284 bp, Oryza sativa
  unsure (1)..(284): unsure at all n locations
cgcatcctcctcttcgtcatccaatccatggaccgtctcgttctttgcttgngttgcttctggatcaagctgaggaagatcaagccgaggattgaaggggacccgttcatggaaagatcatggtatcagcaccccatggtgctcgtccagattcctatgtgcaatgaaaaggaggtataatttagctgaattctcatcnggaatttgtatactctcgtagtttgtagagtgttatgttcattcattgtgtgtgcttactatgagacaggtctatgagcagtcga

SEQ ID NO: 73953 - DNA, 379 bp, Oryza sativa
tatcttccctgctgcgggagttccaccactgccagagcagatcatgccttgcgtgccaacggatgatggcggacgaaggcatcatgcggtggtacaagtatgaagactggttctggcgccgggatgaggtgagctcacttgatctgcaagactatgggaagctgttcgatgcagagtgcgaggcattgacagccgtggaatagatgataatggtcaggaagataaacctaccattgtaggaagttgtttgaccagacattttcataaaatcatagcaagcaccgagaggctgtaacctagagtaataaccataataatggtaacaataatgtgcatgcatggtggtggtgtgggtagctgatgttgtaaatgcatgaat

SEQ ID NO: 73954 - DNA, 370 bp, Oryza sativa
  unsure (1)..(370): unsure at all n locations
tgttcacttcgatgtgctgcgataataaggagcatagcattcttganaattgtnagaacacagtcgcagtaccagtactagcaatgattaatataagcaacaatcccaggtttttttttctatcatcaccagatcatgaaacactacagattcacacaacatatagtatcaattagcaacagcaggggatctagaatctgtggtatttgtgcaaaactacttcccttcccttctgaagtcaatcacgaactgaacaaacgcgcccaaatcagctacacgataggtgtacggaaccaagatttgctcacggtggggagaagaattatgggggtaggaatcagaaaccggccgcaccttggtgatcttgagc

SEQ ID NO: 73955 - DNA, 445 bp, Oryza sativa
  unsure (1)..(445): unsure at all n locations
tatcttcttcntctaactgcaaaataaagtgacatacgaccagtcaatacctctatagccccagtcttcatatctgtgatgaaggctctctgtgggcgtgaccgaacaaccccctcgaccgcaaccactgactctactcttaagttggtcaccacagcataaacttctggatattctggcacagtcgtcacctacacagagagaacaattaccgataagaccatgctatcttgtagatgcttatcaccctacccaccactacagaaagaacaaacaaatcaactcccccatgacattacaaattgatgcgattatatgacttcaatttgccttcgaaggtattagatcactcaacatcatgttattgtgaatattgagctgcaaacattgctctaaccacttcataaacatgaaaacagatcggatgcccgtgctcaaaactata

SEQ ID NO: 73956 - DNA, 410 bp, Oryza sativa
  unsure (1)..(410): unsure at all n locations
ngaggttgatgcagacgatgtaccgcctctttcttctagtctaccaataatgcactccagcagtatacggagatctntgacaatgagctcagtatcgaccatctcttagacatcagcttgccggggcccgcaggccagctagcgcgctgatggcgccggcgtccgtggtgcaggccgcttgagagcttctttgtcaggtcgcatcaatcgcgtcccatgacgaagttcaacttcaacttccttgtctggaatgtgcatgggtttaaacgaccgcgcacaccgggatgctgttctgtcggtgattgtagatgctcgatgttcggtcgtgtgtctgaacttgatgctacacaattaattcctaagtgctaatctatcagactgtctctatttgcgtgggacagctcggtcgt

SEQ ID NO: 73957 - DNA, 404 bp, Oryza sativa
caataataatggccggctcagcaaggcagtagtaaattaatcaccaatcacatgcgttgtggaaagccgagcgcggtaatagcagtaataatgatattccaaacacgggctgctacatgcagtgaacgaagaaaggcagtagtgttcacgtttgcaaatcaatcagccatagatatatacatgcgtccatggtctaagcatggggtgtcttcttttttccttgcctgctgcataaagccccaaaaccatcatgcatggcgcgcaaaagatgacaaatttcgaatcatatgtgggcatgcttacatcctggtcaaagtagatgtttttgacctgcataaaatatgtcgacgaatctaactacaagccctgtgtgtgcaaagcataaaataagatggaacctacgt

SEQ ID NO: 73958 - DNA, 466 bp, Oryza sativa
  unsure (1)..(466): unsure at all n locations
tactcaagcttttttacaatgttcattctaataggtagaattattatatttattgttggaatcagtgaccaacaaatttatattatatataaaatgcttgtatttgaaaacggatggagtacgtcaattgtacctgtctgtgcgctgcgcgttcgtgtccatctattctcaccgtctcaaatntaaaagatnttggaaagatgagatatttntctagtttatgatgtggtactagaaaatatctcatccgtctaaaatctcttatattttagaacggagggagtatatacntttgtcaatggtacatcatcagtcgcatcgatttaggccttgtttagtttccaatttnntttttccaaaaacgtcacattgaatctttagacacatgcctggagcgttaaatatattttatattatatataanatggctngtattgaaaacggatggagtacgtcaattgtacct

SEQ ID NO: 73959 - DNA, 451 bp, Oryza sativa
  unsure (1)..(451): unsure at all n locations
gcttcatctgatgatctgcatgccaaccggnttctgaaaacatgatctgctctctccgttccagaatataaatatttttggtatgtatataaagtcggtgattgattcttacatgatctatcaaccgatgtttcatccgcatgccgatcaatttcttaaaacataatgctctcttctttaaaatataaatatttctgactatgtatctgaacaagtacgattgaacgtattcttgagaggaacataccatttatacattnttatacaattaatacaaaatgtatggtgatgtatatacatgatggggtatttatatatgggacctgtattgttaagatttttacaggagatcatgaatgccacattgatttgattcagagcactcaactgggagaggtaggtctgggccatcaagagcaacctncaaagaaaactttccaggacaattagt

SEQ ID NO: 73960 - DNA, 427 bp, Oryza sativa
  unsure (1)..(427): unsure at all n locations
catggtatgagtttccctggtgatcttttgatctcttattttcttccnctgttatgtctgaaactctgaatatgacaagatcaggctcatgtttcagttagaattagtgaacgtcgtcatgcaccacaggaaagcaatagaggatacaatgaggaagaagaagaagcagcagcttcacaaattcgagatgttgccgtctccctacgacacggcatgggtggccatggtgcctctgcccggatcatcatctcagcttccatgcttcccacaatgcgttgagtggatactacagaaccagcagagcaatggttcttgggacctcaaccagctggactcaatcaccaaggatgctctcttgtcacactggcttgtgttttgcactcatgagaggaacaaccattatatgcaatttttatatatctttttt

SEQ ID NO: 73961 - DNA, 453 bp, Oryza sativa
  unsure (1)..(453): unsure at all n locations
attgcaaaaatgtcaccagaattgtcatnctaatggtattgttgcanaatataaaaaaaaactagtggaaaacttgcaaatgcccctataatatatagagtatttacaaggatggtttgtgggacattaccaagcctaaactagtgattgccaagatggtcttgtctgtttccttcattctctatatatgtagagaggtatcttcgttaaagcagtgtttccaggctgtaaagtttatctgatgttgaaaatcataccattctgttgacaccagatgccccaagtagctatgccaccacttcaataaggaaaggttgcacanattcattcctagccgtaatgaccttgttcatgaatttcattttctcattcctagattatgccagcttgagttcacaaatggacaagtggaaaagagatgtaagtgtctccagtgagcatagctgatctact

SEQ ID NO: 73962 - DNA, 424 bp, Oryza sativa
gcagatttatggctcaacaagtcctcacataagatgccatcagcgtcgcgaggtcgacttacagacaccctatgcttccttataaagccaaaacaactacagcagcccatgtctgtcaggtcagtcattcagaccaagtatgcaccaagaaccctagtagaacaaaaacaggtgaagtagcaagaaacaccatcacagtacgaattgagaagtatgtccgttaatatggttcggcgtgaaaccacacaaaaatgggaagtgcctactcctcttctacttagcatcatttggctatcgcaacaccaacctactgtaccagatcacacattacagctaaacaatatgcttattcccttacaaataagtcaagactacaacagacatttctgcgcggagaactctactgatcacagactctagtata

SEQ ID NO: 73963 - DNA, 460 bp, Oryza sativa
  unsure (1)..(460): unsure at all n locations
cttgaaactcagcttagctctgccgcgcaaggcccagcggttcagttgcttttttctctcaacattcctgcagccatgccaaaaaaattatgggcagaaccgcagaagcattatagggtagattggaatatagcagagtccgatcatagattcctgcaccctataagaatgtcaatggataggattatcattattgaaaccatgccccaagcaactcacaaaaaactggctagtgtacaacattataagacatgtcgctcagagggttntgaacagaatctttttaactatggncatagtattcacagaccactgaatatagaattttatgcagganaccggtgatatttcttntcttttattgaaccagtaccttaatggagcattgggattaagttagttgaagaaacacgtagtgttcagttaacacaatctaaatatatgtaaacaagaacaaata

SEQ ID NO: 73964 - DNA, 323 bp, Oryza sativa
  unsure (1)..(323): unsure at all n locations
ncaagctggtgattatcttgttcttctagcgtatctttatctcgtaaaattggtcgtgcctgcgtagtcaaaattgagcaaataagtatctctacacctatgcagggataagaatttggtactgtctacaagaaatacgttgacgtttgagagttggctttctaaaacctaatgaacaaaccttgacaattggccagcaaaggttgatgtgacacaagggctttagtggaaagatcaggaaacattttgtgtagctcattaacatatgcacaaaaagaaacaaacagatagatggcgctttggcacaacaggcataaaaaaat

SEQ ID NO: 73965 - DNA, 423 bp, Oryza sativa
  unsure (1)..(423): unsure at all n locations
tagaccagataggccgggcttaagcctgggttagttctcatcttttttttcatacttccaacttttccatcacatcaaaactntcatacacacaaactttcaactntttcgtcacatcggtccaatttcaatcaaattttcaattttagcgtgaactaaacacacccttagttcccttcaaacttccaaaaattccgtcgcattaaatattnggacacatgcatgaagcattaaatgtggacgaaaaaaaatcaattgcacagtttgcatgtaaatagcacgacgaatctcttgagcttagttacgccatgatttgacaatgtgatgctacagtaaacatttcctaatgacggatgtaatatgcctaataaattcgtctcgcagcttacaagcggaatctggaatttggttgtattagtctac

SEQ ID NO: 73966 - DNA, 379 bp, Oryza sativa
  unsure (1)..(379): unsure at all n locations
agcttgcttctatgtacaccaaacacacacttatcggggttcagctttatgcgggcggagcggaggttctcaaaagtttccgctagatctgaaagtaaagtttcttggttgcgcgtttttacaaccaagtcatcgacataagcctcaacattacgtcctatttggctacccaaagaaattcgagtagtacgttgaaaagtaagacctgcattctttaacccgaagggcattgatgtataacaataagttcctacggnggtaatgaacgcagttttttcctcatcctccctagccatgcgaatctgatggtaaccagagtatgcatctagaaaacacanaaggtcgcacaccgcagtggagtcgacgatctgatctatgc

SEQ ID NO: 73967 - DNA, 338 bp, Oryza sativa
  unsure (1)..(338): unsure at all n locations
gactctcttatcagcccgaatctaattcgtacctgttaacaaaaaaaaattgggtaggatgactcctgaaactattgaaactgactctatcagtggttntgaatgatggttntgctgatgtggcagtgttgatctggtcttnnnnncatgtgnnnttgacttgactcttatgtgaccttanaactaaatggatatatatgagacttattcgttattcacaaaaaacatatattgtggaacccactgacttggcgcttatgacatgctctctctccaacccttccttccacttcctatttctcctaattctcttctctttccttctaccgccattatga

SEQ ID NO: 73968 - DNA, 443 bp, Oryza sativa
agcttatatatttaaacacgcgtataagaacaattttccttggtatttagcgcattggtgaactgtctttcaaactcttaatcaacacttactaccataataaatccactttgtatcttgcattgtaagcacgaaagatgaaactgtacaatgatattggtcttcagctgcaaattaaatacacctgtcacttgaaattccactcaaaacagtttccagaaattgatgtgttactaatataagtccatcattaaacctcagcaaaggtggcaaattaaatcatttcttgtgcaattgatctttagtcttttgtagcaaatgcttgccttggcaacttggtaaagcatctagcatttccagctagttcatcactactgctactactacattggagtgaaacatgggtccatcacacatgttgattttgcatcacatgatgagct

SEQ ID NO: 73969 - DNA, 64 bp, Oryza sativa
  unsure (1)..(64): unsure at all n locations
actatgatactcagcttctcatagagcatgactagctactactactccgtnttttatagatgac

SEQ ID NO: 73970 - DNA, 437 bp, Oryza sativa
  unsure (1)..(437): unsure at all n locations
agcttctcgttcttgccttatcaagaacccggtttgtccgaccccgccccggcgttcccaactattggcatgcgaggtttccctgaaccgtctagttacttagccagggtgtcccattccaccttgtggttgcactttgattatgttcgatgagtttcccacaggaatcggtccttatatgcgaatacgggacagtgccacataggcacaacccccgcatcgcgagttttcacaattcattntattttcaaacacaccgacaccacatgtcgggttttgaaggcttcacaaacccatttcccaagttttcgacaaacaacggtgtatgtgggatatttggtatacgcgctcagagagcacgaataccgaggtaccacaagggtggagcgacaaggaatcanggtagtacgacctacgganattagtgtgactactgg

SEQ ID NO: 73971 - DNA, 425 bp, Oryza sativa
  unsure (1)..(425): unsure at all n locations
ntatgagtcannggaaatgacaccagggcatgctagtttatgtaatgtttgtgaaatactagctggcaaaggctgcctttcttcctctgtaactagaactttgtgttcctttgatatatcagtgattttaacttttgattcctcgctcccatttagggttggacttccagaatggctcgtgaggtggtttctctcggtcgagaattgttgggtggaaatggaattttggctgattntctagttgcaaaggtagatagacctcatgtaggatattgagatattcatatgccatcattcaatacttaattaatgatttttattatctccgtaggcattctgtgacctggagcctatatactcatacgaaggcacatacgacatcaacagcctggtgactggtagagaaataactgggatcgcaagct

SEQ ID NO: 73972 - DNA, 408 bp, Oryza sativa
agcttcactctaggagctgcaaaatctgcctgtatttgttcggtatattcctgtgcataaacaaataccatttcaaaacacttgaggacatgctcatgatgcagcattgccaataagaaaataacagagatatgaaatatggaagcaaagatcttaaacagatcctggtctagtaatgagatagcaaaaggttcagatcaatgtgctccaggtctggtcaatgtgcttcaaaagtaacattatgtcgaaataatgggaacggtgaaattgtatacaattataaacaagaagttcttgtttgatagtcgataagcacaccactaagatactatagtgataataacttgtaggcttagataggcaattactggaagcttccatacccatattacaccacatgcagtaact

SEQ ID NO: 73973 - DNA, 301 bp, Oryza sativa
  unsure (1)..(301): unsure at all n locations
ggtccacaaacaaatgacgaatagagaaattatttgttatatataacttaaaagatgacattactaaaatcaatccatcacaaacgagtagctagctatgcatcgtccttgagtttacctagaataaggctaatgatgagaatatagtgagagcatgcgaaaagattgcagatnagatcgttggtccctcggtgcctggccatcagctccaagtagtagtattgcaccaccgccagaagcgcgaactggatgaggccgatgacgtagctcctcaagcgactcctttgagggagcgtagtag

SEQ ID NO: 73974 - DNA, 446 bp, Oryza sativa
  unsure (1)..(446): unsure at all n locations
agcttctacacaaaacatacttcattatcttcatgcatcagtatgcacgtacttcacctcccttgtcttcatgcatgcacgtcgtctctctgtgctgcatgcatgcatcgatctatatccttgtttcaccgcatgcacagaatctgaatgtcgctcttctcttcaactctcatttttatagcaacttcatttagtaaaagtttaaattatttattctatttgcattctgattgcaccattatattcacctcaattaaaactttataacaatatctcacttgtaatttaaaacaatatatgatcattttttaaattaaaacattntatattatatataaaacattgagttataacagttgaaacaccacaaaatactgtctgaaatattaaaaaacactacatgcaacactcgtgaaataattagtgaaacgtcacaaaatgcttat

SEQ ID NO: 73975 - DNA, 474 bp, Oryza sativa
  unsure (1)..(474): unsure at all n locations
tcgccaaggtggacccttccggagggacatactgtctaaagctgcgaggcgtaagcctagccacggagggcatatgtttcgccaaatatcggacctcgccaggagaacgtccagcgagtcgacacgccttccggaggcttcgccaaggactgggccgagtcacttggcccattatgagcccatacaagcaaaagacactatatgcccataataatgtccctatcatatggataaccatataaattcccctgtaaaaactaaaccctaaagagagagtctgtaatagtgatataagtagccccctatggccaggtaacagggggatctgtaaaaaatttactaagcaatacaattgtctttatttccaaccactcttgagagaaccgcgtctttcgacgtgacgcagttgtcgaatcgacaactaatatattatntatttatttgaagtttagttaaaaatggtgnggtctatat

SEQ ID NO: 73976 - DNA, 440 bp, Oryza sativa
  unsure (1)..(440): unsure at all n locations
agcttctcttattgaaagggggaaaagattgagcaagaatgagtacaaccacagtactcagcaagccacaccggagatgcataattaatgtaagggggtacaacgggtgataatataaaggttaggttttgcagaaaacagcattcaaaagtcacttagttgcccaaagccatttcataaagacgatcctagagctacacagtattattaaacaaggccgtgaaccctcacgaacctgccttaacccaaggcctacgatgattcagaccgaactggcaacccgaccctgggtcccagctcgttccaagccaacccaggccaaccattccacattttttgtgttgagcaaattttaagaattaaaacactgacttgggtacattgctcngctttgccataaccganggcgcggctattcgaatagattatactctgatcag

SEQ ID NO: 73977 - DNA, 283 bp, Oryza sativa
  unsure (1)..(283): unsure at all n locations
ataagggggtttttttcatgctgtatcctatccttatacagccaatctggtctaactatatcggctgagaccctcaacaatacgtcgtcagcctatcggncgatctgctatcagttaactaatcatgtgttgtgtatccttgatagttgcaagatcaaaccagattgcacgccgttagcatactctaggcaagcctatgaactgctcttgcgggaaactatcttccattccgtcgcgtttcgcgtcatcaccggaacttctacacaactctggctctcctaca

SEQ ID NO: 73978 - DNA, 265 bp, Oryza sativa
tatcaggcggatgtgcaataaagacctgtcatcgaaatataacaatactgctcctccaaaaattgaactcaggtattaccctcctcataagctctaaagaaagactatgatgcccctcattaaatgcgtgctaaatcagatgggaagagcgcatgaagttaaaatacaaacctattacaatgagaagtggttgatgggacaactagtactctattgtgataactatcgtcggatgcatctgacttgtgcaaatacaaacactatg

SEQ ID NO: 73979 - DNA, 341 bp, Oryza sativa
  unsure (1)..(341): unsure at all n locations
tgtgatgacacnngaatggaacacagcgcctacaaaattgcctgtttatggcaagctgagagtcgtcctagtaaataaattacgctccgacctcttcaaatatttgacgtgatggtccatgtttgctttcgtgttagataaagagcaaagtgtgcttttacctacttcctttgagatacactatgtagtgcaatgggtgtaaggtttcaactccaaaatccagttgttcaacatgagattaactgagcgctgtaaggtttggtcccattntctccttaaaatgtgatatcttcttcttattataaaggcaaaatttgatacaggacacccaaaatacgcgt

SEQ ID NO: 73980 - DNA, 373 bp, Oryza sativa
  unsure (1)..(373): unsure at all n locations
caagttgggttgtggacagtggttgcactaatcatatgattggagagaggagtatgtttacaagtcttgatgaagagaacggatctcgtgagaatattgtttttggagatgatggtaaaggaaaggtaaggcctangtaaaattgccatctccaataatcaatctctctctaatgttcttcttggcaattcattaagctacagtttattatccgtttctcaattgtgtaaattgggttacaattgcttgtttaccgacgaggatgtaaccgtctttaggagggatgactcttncgttgcattcaaaggcaagttgaagggtgatctctatcttgtcgattttgatgtggatagagtgaatcccgaagcttgtt

SEQ ID NO: 73981 - DNA, 431 bp, Oryza sativa
catgacataaatcaatgccatttttatcaagggatacctgatatatgcttggacttcatcgcaattccgcagaatataaatatgagcttgttctgattcaagcatatcaagatctcgagttttacaagaaccaatgggccttccatcacaggagaagattgatgaattaaatttgttaccaatagatgtgtcatgtattctttctggacgattgtgttttgtctcgacatcatccaagtacctagagcttaatgtcatagactcatctgcgatgtatccctcatcaattgaaccctctgggcgagccatattccgaactagcgattgtaggtagtgaatttgtctctcaaataaatacatccatcgatacatggctggtccaccaattagagcttctctatccaaatgaacaggctaatgcatcatgacat

SEQ ID NO: 73982 - DNA, 338 bp, Oryza sativa
  unsure (1)..(338): unsure at all n locations
cctagaagaagtgagatccatgctagagcagcaaacgtcttgattgaatgtgttacaatcaatttactgccgtccggaagatgaacgaacaagtgccataatttgcctttggcagtggtggaaagagaggaatgaagttatataaggaggaataccaaggagcccatctgagctctcacacctgattatgtcacaggcatgagagnttgttaggatgaatgtaaaggaaaatagctccagaacaagagagtgtgcacgttggagacggtcacccctgaactttgtgaacatcaacaccgacggagcatacagtagtaacatgaagcaaggaggatggg

SEQ ID NO: 73983 - DNA, 440 bp, Oryza sativa
  unsure (1)..(440): unsure at all n locations
gctgtatagttggtggagactacaacagcaaaccaagacaaggggaaggcattgaaagttcattcagatggaaacgagtttgcagttacttaatctgacacttggcattaggtttactaagacacttaacctaccatttatatacatatgcaattaattatgtatcctagaaaagcaagggtggcctctattattcaagggagagtccatgaatatattagaaccttttatttattaaatttactcccccacccacaaatataagagattctcactatacacctttataaatatccataatcccttatatttatggacggaagtagtagataaatagattntatataaaacaaagaacttcgtgaaagcaaatactttgtataaaataagggaaataatggaaagtccacccagagctggacgtatactactaacttctg

SEQ ID NO: 73984 - DNA, 415 bp, Oryza sativa
cgatctcgccggatcaaatatttgacgatgatggttcctatcttgttggacgacatactccggtcgggttagatctccccataaccgaagttatcgagtagcttgttgttggagaatccatctcttaaacccatctcgtcgaaatcctgaagcaccaaagtcccctacctggcgcgccactgccaacgtttgatgtcacgattccggtatttgcatagtatggggatcgttggtactaggatatacgcgagactgaggtaaaagagacggagacagggatttttatacaggtccgggcccctgaattgtcaggtaataaccctacatcctgttggccgaagccggtattgctcttattcaccataaacacaccagtataatatttggggtagcctatctatactgtgtcgacatg

SEQ ID NO: 73985 - DNA, 428 bp, Oryza sativa
  unsure (1)..(428): unsure at all n locations
gtcccgggatctctaagtcgactgcggctgctttttgttattatgaaggaggccacagtgatgtgagccgtaagagacaggaagattgcgggtatgggcactcgccaccgccatcttgggaaaaagaggggagggaggaggatgtcngttgggggtgggctcacctgcaccagtggcgcctttctgcattaaggaaaacgagggggtgagttgggaaagtatagataataactcaacattatggagggagagaacgtagattatggttgagaatatgttgacaaatttcatagtgatccaacggtccagaatttgatatatttccgggttattttctacggaatgtcatatacgtatatccctttttatataacaaggaaaacacaatacacgcatggatgtacgaacatgtatagcataagctcaag

SEQ ID NO: 73986 - DNA, 382 bp, Oryza sativa
gcacagagagcaggtcttgaagacatgctctaagaaatgaagagaaaggtactatcctttattgcttatcttgatatcgtggacataaactactataagtcccagacatatgttatgacagattaagaatttctcttgttcagtattagcttggtgataatcatgtagttgacttttgtttatgttaaaagctatgcaaatatctgattttctacatttggcgatgtcatactaggaaaatcctgttttctttttttaaatgacgaagccgtttttctttataagaaaaaacagcctgcaccagggctacagccttcacaaaacatactcttttttttaattaaccagcttctgcacgttttcccccccccttctcttgttg

SEQ ID NO: 73987 - DNA, 485 bp, Oryza sativa
  unsure (1)..(485): unsure at all n locations
tcagcatataatgcatgtacttacgtaggacacatngtatttagttctatagttagagcccgttcggcagcacgcttcagatcagaggagtacacggcaactggcttagcttttttagccaaccgacgagcaaccttatacgctagcaccaattccaagttcaggtttttcgataatggaattccaagttcagacaaaaccccaaattacaatcctgttncattatttgaaatgttttggataagctcaccataacagcttgctgtctgccaacctcattcaactctatatccgtttgtccctgttaaaattgntctgatgatctgtcaactccagagaattgatggaatgacgaccaggggactgaagagctatcgactgaagaaggccatcaaccaagtataattctcatgatatattgataaggacaagttattgctgacatgaacaaatggaagacaagacctgcgacctgaatgatgcac

SEQ ID NO: 73988 - DNA, 164 bp, Oryza sativa
agcttatatatatttggtctttgaggccatgagcaacctgcacctaaaccttggtcatatagctcccttcacgaactcaatagttaaggtgtgacacttcgtatgtctatgttgtggtgtggcaagaggttgtgatcaagattggccgatccttggggaggggg

SEQ ID NO: 73989 - DNA, 412 bp, Oryza sativa
  unsure (1)..(412): unsure at all n locations
tattattacgcactatataatttagctgacaaaccatatggcgacatgaagttttgtttgacatacctgacagcatggcagatattgaaaggatctcatttgaacagttgtattttggactgatgacaagcatctttgacatctggggatctagaggaaattcactcattgtttcacctaaaggcgtgaggtttccatcatcatcaagtgcccctaagtagttcaaaacttccaaggccctcatcanagtttctggtgcaggaggatccatanagtcaaaatgcactaaatcatcaattccaagcttcttcaaggtaagaaccgtattcgccagaattgacctaagaatntctgggtatgtctgtggctgtannatcatcgtaaaactcttctctgatataacctgaaacac

SEQ ID NO: 73990 - DNA, 436 bp, Oryza sativa
  unsure (1)..(436): unsure at all n locations
agctttttatgtttttggatgctcatcataaggtactaaacttaattccacttggcagtttatgaagcttttattgtcacctggtacaaaacttcctatgatntgcattctgaacttcaactgaagttccttttctaatctcaattaaatccacctctaccttttcttttattaatcatggttcttggactatgatagatatcttggcattctcattggaacttcactattattgtatgcaggatattgatattcctgaggccatgctaccagagcccttcaattcaagggataagctgcatctcaaggcaccacttgatggacattctgctgagccacttctacagagttctaacagaaatgaacctttgaatgcttcacacttcccatgttcttttcaaaagcttatgtcccagaaaattattgctgatggaac

SEQ ID NO: 73991 - DNA, 455 bp, Oryza sativa
  unsure (1)..(455): unsure at all n locations
tncaactctttcacctatatttccacatgagatgtgttgtcttgcaaactgctttgagatatatagcacatgagatgtttggtgcttgctgatgattcatcagtttgttcaattctcgtttccttttactattatttttaatttatgatccaaaaatatatggttttgcactattaatttctatattcaaaacgtaggttgtgtgccgtatggcagaggatgtggatataaaacattaattttcaattatatttacaaaatgtattttgcaattttttatagaacttttcgtgactatttggtttttattcttaattgagttaacaattgagaacctgttcgtttcttctaaggctagaggataaaattctgcatacttgtggcacgttnttcaactgctaaacagtgtgtttcgtgcccatactttctatattaaagttgttcaaaatatcata

SEQ ID NO: 73992 - DNA, 411 bp, Oryza sativa
  unsure (1)..(411): unsure at all n locations
agcttctattgctgcactgaagaaaaacttaactntgcttggtaactcctctgcagcttcctcatgactttcctgtgtgacaatttattgactatttatgtcacattctgttctccataaagtgcaagcagtttgttcaagatttgacaatgtcacaaaaatggttttgatctaagctgtatatccaaatgtcaaattataaaccgacatttagatgaatcangacagtgagataacttaaaatacgtactgaattgaaggcccaatacggacgagaatgtaagatagtcttccatgccagaaaacaaccaagcaaagccaaaagtcttctgcatgtactacagtactacatttttgtgaaggacaacatggaaaaatgatattaaatgttattagatccttacaagaatc

SEQ ID NO: 73993 - DNA, 353 bp, Oryza sativa
tgaattcgttctttcaggcaccatatgcgatgaaattggtatgttcatactacttcagtcagaaagtgataatctgtgtacctttgtgttcatatgctatactcctgtaattgtaatcctccatacttgtaaatgttactcgaacagactggtccattactgaatagtaccttttttaactgtctcagtaaatggaaattttaatctgctactcccttgcttacttactgaatagatggtccttattctctacttcattaaaaaagttgctcagactgtttgcggttctctccatatgataggatgctaggattaacttctattcttatggatttggaagttctttgttaact

SEQ ID NO: 73994 - DNA, 386 bp, Oryza sativa
gcaagaaagagaacctgtccgccacctcgtctccagttagcttcgaagattcgcgtgatgggtgaagctgtgcccgatcgtgctgaacctgtcatcgacatcattagtgatgaggaagaagaggaagaccctgaagaaagagagccagctactccagaggaagaagatccatcgcttcgttccgacgcaaggcgggattagtcgcttaataagatcgttgccgtagttcgctgtgttagattgcttgtttaagtttgcttgtgagtatgtgggttttagttgttgcttacatcattggtgggatgtaacagcatgagtctagttcttttgcttgtcagagtgtaagatagttggtgagatagtgtaatgcaactaaatgtatcata

SEQ ID NO: 73995 - DNA, 401 bp, Oryza sativa
  unsure (1)..(401): unsure at all n locations
nttcgacaaaggttcttctggccaaccgcccttaaagacttcttgcgacatgattcagcggtgtgaagcctatcaattctacagtaaacacacaaggctaccagcgcaagcacttcagactatccctctcacttggccgttctcgtgctgggggctagatattctcgggctattcccacgaggataaggcggctgcaggttcctattcgtggcgatcgacaaattcactaagtggattgaagcgacacccacgagggaaatcaaggccgacaacgccatcaaattcatcaaagggatattctgcagattcggatngccccaccgtatcataacggacaacggctcccagttcatcagtgccgattttcaggattactgcatcangctgggagtcaagatct

SEQ ID NO: 73996 - DNA, 399 bp, Oryza sativa
  unsure (1)..(399): unsure at all n locations
agcttgtgggcgccaacaaacctgagctcgaaaagaaggttcaagcacttgctgatggcagctgaaccttattatagcgcaacggctagaactgaaacgaatttggcatgtctgtccggccaagtttgtgtccgtgtgctcccttgcagcttctagtgtatagttttggtgtctctgttcaaaccatgtttctttttctttctgaattntgcccatgtgtctggccacacacatatgcaatctgtgaactaagaagttgtgatgtgttcagagctgtaacataagagtaatgtactagagtagttttaaaagacagtgatatgggtgtattttgagctatgaagttgtgccaataaatgagtgggttttgaaagtgactcttttatgattccttctact

SEQ ID NO: 73997 - DNA, 459 bp, Oryza sativa
  unsure (1)..(459): unsure at all n locations
tagcanannactttaagaaatcaaagacttcgcatgaatcatctagcacagcataaatacaccagtattgtacaaattgagcctccatgtatcacattcaaactcagtcagaatcagtcctttcatcatcagagtcttcattactcggttggaggtcgttgttgcgaaattgctctacaacatcactcgcaattntgtcagccgcactttgcgcactgctgataagatcaagggcagcttcttcacttgtcccgtctgcaaatccatcaatggtgtcgacttcaattctcgggtacaaggattntgtcatcgccaaggccatgccagctcccatacttccagctttcttgatattcttgaaatatacttccggagcaacactcaacttgtcaaatatttctggtgcgtcgagtgtactcggaccactgttattgaggaacatggcttggatgagtggtg

SEQ ID NO: 73998 - DNA, 335 bp, Oryza sativa
  unsure (1)..(335): unsure at all n locations
tgaaccttctgttctacagtagtggcataccatactattttctctgtctgctctnctccattaatgctggttgtggaaacttcagcctattctggtgtcaaggtagacttgattgtcatatcatcacttagcacccttnttgccattgtctgtccccatcctgggggaatgcgatgttcagacttgcagcgtcaccccttgctgactaactctggaggagtgatatgtccgatctttcgcgggaaatctcgcgttgtcaagggaccaaacgtccgtgagtgaggtgggtgcctctctacagtctgtccactgatgcatctcctatctctagactg

SEQ ID NO: 73999 - DNA, 197 bp, Oryza sativa
cctggatgtcaaacatccacgcgacctgacgaggggggttgtgatccaaccccttcggccccgatgcccgctggtcgtcatgggtcggagccgaggccgaggtacccggtccctcggggggtccaaccttgctacggttgccaagccttactttaaggtcctgaaggagggggctcgtgtccacccatacgcaaaac

SEQ ID NO: 74000 - DNA, 429 bp, Oryza sativa
  unsure (1)..(429): unsure at all n locations
agctngctttgtctggaaggttagcaagagggaaactgccaggatggacctgcttccttacaagcctcaagcaggttcatttgatcgcgagcggaattgcgcaagattcactcttgcttctttcgtcgctgccagggcttctgcatcttagcctcaatgccgccaccgtgagaaggagatgacctttgccgcaagtggctttccgcactccagacactcaccttgcatgagttgagtaaccttagtcagatagagttcagagaggatgccttgctgagctacatgaactggtgcttgacaagtgcaccaagctagctgatcaccacaaggcatgggaacctacacgtttcagaatttgaactcgttggatggcccaagctgaggagaactgatgatgaaaagggatatggtgtttacaacctggcctgc

SEQ ID NO: 74001 - DNA, 142 bp, Oryza sativa
cgcacgctctttcttgacgacttctcatcccttgcatccagaatcaatcctaacatgacagacgctcccaggctcaccttcaactggaaaatattctacttgacaggatttacactgtagtaacttcgaagtattcgaaggc

SEQ ID NO: 74002 - DNA, 227 bp, Oryza sativa
  unsure (1)..(227): unsure at all n locations
caccgncccgatcctaagcacgcggatgcacttttttttacccctacaccgtgcaaaagacataaagtgcacaagaagctgctttagagaaagatagagaaaggatgtcttgtatgcatgcttgatacctaacaccatcgcgagtgactatgaaaaaaacagccgactactgccattttaaaagagacccaaaataatgcataatactctagggctacatttctagc

SEQ ID NO: 74003 - DNA, 235 bp, Oryza sativa
  unsure (1)..(235): unsure at all n locations
aaaaaaaaaaaggcgggnnngggtgcgcttgcactctgacaaacacccgcccgggttccaaagccaccggagcatgcagcttcattgcaatctaaacgggacgccaccagaacacggtttgtacgttaaatggataaaattggtgccacactgattatttgagaacatatccaacccaagactagtaacaactaatctctgtcccccgaactgaagggacattaattacttctgg

SEQ ID NO: 74004 - DNA, 447 bp, Oryza sativa
  unsure (1)..(447): unsure at all n locations
agtctttatgagacattctgatagctggacccatccacttgtgtntatgcgaccctgttgacacttttgcatgattagaaagtgaaagaaagcattgaatcaacaaagtgaagctttagtaacttccatttttgagacataagggtaggcagtcgctatctatggccgtgtacacccttgttggtgtagaggccggattttaatccattatccaaaaaaagggagttgctatcctaaagacattttggaattccacatgatatccatttcacaattagaaccctggaaatgaagaatgaagtcatttgacgaatagtagtatgaagaaggttactaatatagaatttggtagctctaaataagatgcagaactttaaacccaggcacgtttagcgaaaagaactaaacgagagtaatggcttttttattaactccaacagataattc

SEQ ID NO: 74005 - DNA, 359 bp, Oryza sativa
  unsure (1)..(359): unsure at all n locations
tgctcagcgcgcgccgcgttaaggctgcatggtacgcacgtcatgagcaggtgagtgtaacaaaaccggttgtgaaattcgatttcatccattacttgtgtatgggtttatctaaaggatggtttcttaataagttatcttttatatatgtcacgtaagttcgatatgtattaagaaattaatatgaggtatcagtacttcacggtaccaaatcaagtttgatcgctggatctaataatgtccatcctgtntaggtagatctaacgattataaacgatttattactggtaggtactagtacctcgagatgccttattgctagaccagagcaaatctcacgtatgttactacttcataat

SEQ ID NO: 74006 - DNA, 414 bp, Oryza sativa
caatcactcgacccgggatctctaagtcacctgcggcatgcagcttattattatatccgcaaatctccatataacagcattaaactttggatgatcatatcttggtcatacgaactctgaatcgacccgttcaagtcttctaatgtttgttataacctaaagaaccctgtgctttctttttatgtattggtattgcttcttataggcttgtagctttgcttgtgtgcttcgcgtagcttctgtcgttccggaggttcccgaagcgtggttcgtggtcgtcaccgaaggttcggaaggccgttctctctgagcaaggcaagtcacatcatccttgagcatattgaatcccacgttataaaattattttgatttaaattaatgcattaccgctttatttaaattcccgcgttatca

SEQ ID NO: 74007 - DNA, 443 bp, Oryza sativa
agcattatctctttatttgccttgtaactcgatacgaatagtagtttggttgtttcccacaatagtttggggttcagtttattaaatccgcccctgttttagcataattatgatgggatactttactatatgcgtatttaggcgctaatcaggtttttggtttattctagataccgtgggagcactgaagaaaactgagacatggatgtttttcagcgattctactgtttcgtaagcaaccctactgttagtgttggttgtttgaagatgattgatgggtcaaggtttcagaatatgttgggcggtgctggaattggacgtggtatatgttgcagaggaaggcaagacaacgagatgaatggcttccacaatatgccctactaccacaaggtctgggagagcttccacatgttcgtggataacgcctaccacctgaacatgat

SEQ ID NO: 74008 - DNA, 376 bp, Oryza sativa
gggtcgccttctttcttagaacaagatgaccaggcatcagctccgcgaggtgaacttttttgttgtaagttgccgaagtgcttgtggcgtatttgggcatgtgctcgagcgcttcgactcttactccttccaaaagttcgagcatacttcgcggtcctcttcgcccccagagaacatcacccttggtgagttagcccctagctttgctggggtcattgcctcatcaccataaagaagcataaacgggctaaacttggttggtcttgtgggggtcgtccgaaaggcccagagaaccaatagcaattcctctggccatttgactttcgctgccccctcgagacttttctttagtgcttctaggatcttgccatttgat

SEQ ID NO: 74009 - DNA, 451 bp, Oryza sativa
  unsure (1)..(451): unsure at all n locations
agcttttaaacttttggatccaccaaatgaagggcttgttttaactttttatgagaatttctatcatatttattatacttttatctatcaactgtaaatcacctgcagtcaaattttattgtacacaagcaaatagacataatgtgcgttgatgccccttattgttttacaggctgttgaaaactggttagctgacagggcagtattgccacttgagaattcattgtgtggtagcatacatatgaactttgaccttttacttcgtcatagattgcacattgttggagaggtccgtcttgctgttcgtcattgcctgttagccaatcccggtgtcaagattngaaaacttaatagtgcaatgagccatcctcaagtcaaactcttgcacaagatggcctaaatattctttattttttggtgtactaaacatgcagacatattattntaattc

SEQ ID NO: 74010 - DNA, 150 bp, Oryza sativa
ccaccaaccacggggggccaagggcgtccaaaagggcccacacaaagacacaagcgtacagaagggaaaaggacggacccaccacaccaagacccaacccagggaggccggccgaacgcccaaaacagaagaacccatggccaaaagaac

SEQ ID NO: 74011 - DNA, 199 bp, Oryza sativa
ttaccttgtagagcacagatctctggccttgaagatcagcacaagaactatctgaatactcttagcaacgactttcctagctgtccagccagaactgctgcttcctgacctccacaccgcttacatcttccaagctaaaattgcacactttgactacgacaaacctgcattatggacatggctaaaaacacaatgtatc

SEQ ID NO: 74012 - DNA, 406 bp, Oryza sativa
  unsure (1)..(406): unsure at all n locations
agctnttcttataacttgcgctgccgacaaggagttgtacatatgcacgatccaatcccaactaaacagatacggtcggcctgcgccgtacaagatcgacatcatccttccttcaccggattccacccgacatctatacatccaaagtgcgcacaatggtgccagcaacgtcatcaagttcggacgactaattaatagtcactagaacaggatcggttatctctaatgggcttaaagcatcatcttcttcgggctgggcccccgtcactaagcaaagatcagtgatgtgagaaaatatctcaatcgggcatccggccgtcacggatgacacatctcaatcgggccaacacaaaagcccgttactgatgactctcatctctaacgggcctagattatatgccgtcac

SEQ ID NO: 74013 - DNA, 357 bp, Oryza sativa
tagcttctcgttaggtggggggcacaagtgttggttgatctttggccaccgagccataaaggagagcattgggctcagcccaccaaggctcacacgctccttgactttgaagagtgagactcatgcacgagtgacaactcatgtactctaaacattcccaaaaccatcagactaatgatcttaagacgtgctggaggggagcgaatgtcgaattcctattgccaccgccgcaccatggcgaattccgtcgccactgccgttcggtgatctccatcaccaacgccctactaccagtacactgacgtgactcatgggttcatcaagatccggtcagtaaaacaccaaattccacataaa

SEQ ID NO: 74014 - DNA, 413 bp, Oryza sativa
  unsure (1)..(413): unsure at all n locations
agctttgttattctatttttacaaggaaaaagtccatataccccctaaactttagatgaaattccatctatcaccttgaactttaaaaccggatatccaacccttaaactttacaatactattcatgtaacccatatggtggttttacaaaatgattactacaaatctgcatattcgatggatgattttgaatatgtgacatatgccttggacatatatgttaaatctccactcgaataaatgaataccaatataatactaatatgatgttactatatactataatttaagaccgatgattgaggtatgtaagtatgttatacgagttntcttaaatcgctcgtttaaactttaaaatatgcataaccactggctgaaactaatttacgggtaacatgaaatgtattgcaaag

SEQ ID NO: 74015 - DNA, 227 bp, Oryza sativa
  unsure (1)..(227): unsure at all n locations
agcttgtatgctttctaccttcatggatatcaaaagcttctgcccatcaggtacactgtcacagnttatggaaagttgaaaaatccaacaatagatgtactaaatggagtttggttatgttacacagaggctaagtcgtgcaggacgtgttctagctggtgctgctataggctgtatcctaaagtcatttatgatgcgatgccacagtttcagttaccctgaaattc

SEQ ID NO: 74016 - DNA, 417 bp, Oryza sativa
  unsure (1)..(417): unsure at all n locations
aaatgaatactggatctcgcatctactcaatatttactacattgtatcattcaattggtttctcccttttttaaatgacatatcataggtcttcttcaaatggtataaactaataacttgggtaagtttgcgacttcataatctcataanaaagataaggtaagttagtggcttcacatgctcaaaagaaatgtgaggtggaaatgtgcattggacatatgtgatttcttggatattggaatgcatgtgtatgatgttaatcttcttgattatctatgctgaattatgaaatatgtgatagtaagtgttgctgcgatatctataatgtatctggttttcagagggcatcgaaagaaaattataaggctagtcaacatttagaaatattttctttcagaaatacctcatcactgacat

SEQ ID NO: 74017 - DNA, 295 bp, Oryza sativa
  unsure (1)..(295): unsure at all n locations
atacaaaaaaatggaaaaaaacaaggggnttgtgtctaaccggacctccgccggacccaacaagagcagactatttatacggacacgcaagctacgaaacgatacccggacacatgcgcaggagagaccaaccttagatccagaactgactagggacaaaacgagggagacgcatgagacgacagcagcaggggaggacagaacagaaacacacccgacacgtacctttccataacgctcaggaagtggcgagcgggaagaagcccgcacacccactcttctcaacacaaagcag

SEQ ID NO: 74018 - DNA, 398 bp, Oryza sativa
  unsure (1)..(398): unsure at all n locations
tacagcttttaggtcaaatcattacggaaatcaacctcatgagcagcactcttctgtatagtagctatactactaccgatgagaagtccagaacttctttccaccttttccaatgctaccactaacactgtttttgtccatgagtaagcaatagaacaaatgacaccaattagtaaaaaaagcataatagtacaggataagcatcctcagtagcagcatgttatacacattacatgcatctcgcatgttggaagagatgtgccccagatgtcagcagtcagcacatgccaacagttaataacactatcataatanacttggctaatagcttctaaaatcatgaagttacagccttgcacaatctaaagagctagaggataatctggaagtctgaatca

SEQ ID NO: 74019 - DNA, 394 bp, Oryza sativa
atcttaagctaattaagggattatacagcaacttcttaccttcggatacacattgagttctatacgtatcaatcaattgaatcttagttgatgaacatagatgtgtatgacatacttcaacacaacatgatcttaatcgccaagatactaataatgctagcttcaattaatccagcccacaatttttagcgagctaaacctcaattaattaatgccccatcatgaacatgaaatatataagatcactgtatgaataaccatgaagattcacatgacataccaccaaaatcattgtcgaatccataagacgttgcaaatgggcttaatggaactgtcataaacataaacagggtggtgaatgatggaacagattgtctgatcttcataaataccg

SEQ ID NO: 74020 - DNA, 343 bp, Oryza sativa
  unsure (1)..(343): unsure at all n locations
tctaccacaccgaccctaacaaggtcctacttttcaacggactactcgaaattctttgggtagccagctaggacgcaatggtgaggcctatgctgatgacttggttgtgaaaacgcgcaaccaagagaccttactctcggattatcggaaactttcgaaagtctccgctccacccgcataaagctgaaccccgataaatgcgtgttcggcgtgcctacgggcaagcttctcgggttcttggattctgcccgaggcatcgaggccaatcccgagaagatacgagctatagagcggatgcgcccccccagcaagcttagggatgngcagagcgtcaccggctgca

SEQ ID NO: 74021 - DNA, 419 bp, Oryza sativa
  unsure (1)..(419): unsure at all n locations
agcttttatgctggagatcatgcaagtgcatatgaagctcatctaaatgctgaaaaggtattattttcccatgttatccttttcagcacaaagcataactcttcgtcagactatttgaaaggctaaaagatatctcatgcacccaacaacatttgatttgattcacacaattgtttaagaactattcaatcagatcacagagagtaaatccatgtatattgctcctctgaatcaatagatcgagactgatgggatatggtcgcatccactacgctagttagcacatcgttctttctcttgaaaatagttagcacatggtgaaatggcttntgaagtggaagccccatacctcaaggcatgtgaattgtatttattaccgcaatcctatttgtgtcattcaattctcaattatggatatt

SEQ ID NO: 74022 - DNA, 356 bp, Oryza sativa
caatcactcgacccggatctctaatcacctgagctgcagctgttatttccgtcttgaatgctggcactctgtgtaacaataacgaatcacactatcaatccatcttggtggtagattaatatttatcttgtatatctgttatcatttcataatttgctccaacttaccttcgttctctgttctaattctgccaagtacatacatgggcttacaacaatctttacaatttgcgaatcaccctgcattcttcaagcttagttttactacttgataactgaccacagcaactacgtgttggaccataatgacattgcgtgtgattaaaaggacacagtacatggagttttatgaaagtt

SEQ ID NO: 74023 - DNA, 435 bp, Oryza sativa
agcttcttgttctgctgatgatcacatacatgcaggcgagcagaaatttgccgagctctcgcttggctggattgtgctgctgcgtaattgcactaacgttggaacagtggctgttgggttggagatgatgatgcgtgattagcgcgtactgctggtaggaagataacagatagataaattctctatcttatcagatagattccttttcggatggaccatggtatctgtatatatacaggtctacggtcgattgaagaaaccccgatcaccaattatcaatctactatttttctcgttctttactattcctggttattctattttgctttatggctgagttctagcaaccctagaaattggtttatctatgccgttttgcgttgaaaacggtcgtcttctccacgaaagcgatgaggtatcctttgtagtttggtc

SEQ ID NO: 74024 - DNA, 425 bp, Oryza sativa
tcaaatgtgcaaatgcaatgctggtactggttactacatgctggttgggctaatggggcttgaggcgttaatttggtaatctgacatgaactgagatctgaaggttcatatctgaagattctatgtctggtatctgaagattttgttcttgattacgtaaatacagcatctatatggcatgtatgactcgagtacgtgttccatctgatttctgatcagttaagctacgactggtaactggtaagcagtagatagtgaacaaaatgctcaagaataagttatgaataaaactttagagtaaattttagtttttatcaccttttattaccaaagtgttgctctggtcactctttactaaacactttcactttgacctagtaatttaccattattgcactttggaccacccgactctcttctaagct

SEQ ID NO: 74025 - DNA, 415 bp, Oryza sativa
  unsure (1)..(415): unsure at all n locations
atcttgttagcctctttgctccatcaacttcattgagactgaagcggatgcaagaagaagcttggctgggcgtctccaatgtagatgaagagctgatccccattgacatgccattcctggacatcgacccgctatgcaacccaccattgccgagactgagggggatggacctacccggtcatcctccacctagacaccctagaagacctccaacccatgctctacaagacctatgaatggacctacgtggtctatgacgatgcctctcgcacgcactcgtgtccactttctattccatgcaagccggagctgagcgcggtgaggggcctggatgatgacccanatggtggcggtgggcgaccaataccatgccacaggagacgctcgtgctctctctaaggctatatcactggct

SEQ ID NO: 74026 - DNA, 322 bp, Oryza sativa
agaggggagattgagaagatttgggagatacgctaaacgaagtaaaccattagtgtataattaattgagtattactattttaaatttcaaaaatggactaatatgattttttaaagcaatttttctatagaaaattataaaaaaacgtaccgtttaatagtttgggaagcgtgcgcgtggaaaacgagttagagtctccccaatctctccccaatgtcctttgaaagaacgccgccagtattccttgctccttaatactgctccctataactaggataccttcgcagccaaaatagcatctacacactagagagtcacaatc

SEQ ID NO: 74027 - DNA, 368 bp, Oryza sativa
gcgtgaacgccattagtatcttaccaaagaaaaaaaaattcagatgatcatgtgctcgtgcctacagatggtgatcaaaatataggaattccttcattttcctgtgcatgatcaaaaaagattgttctagcatatatgccacacgaggtatctggtacctcatccaggccgtgcatgggtgtcggtaagcacgggacggaatgccgcggagacactgctgacagcggcgtcggtcgactgggaggcggtaaagagcacgggaaagccggagaaataccgttctgataaattcaacggcatcttggcatcttttcgtcaagactatgaagaaaaacggcatttggtggaacttgaaatgtgagaaacac

SEQ ID NO: 74028 - DNA, 403 bp, Oryza sativa
  unsure (1)..(403): unsure at all n locations
gctcggacccgggatccttaagcgacctgcagcatgcagctngtatttcttangcccgagccctcccaggaagtgctcatgtctcgcgttcgagcacatgtacacgactgcgcgaccactggtcttgccaactcacactacggaggtcccaactcggagcaccttctcaccaggagttgccgctggcaagtttcaataggagaggagggcctctcgtagcctctccatgctggatcatcccatgtgcaaagacgacatgaccttgaggacacaccgttccgcaccttgtcgtggcacaagccgattgacacgtccgacgttgccgctcattggcttcttttagtggggaaacatctcatatgagagccgtttagtgctggaaaggtgggcctatcttgtgtcc

SEQ ID NO: 74029 - DNA, 425 bp, Oryza sativa
  unsure (1)..(425): unsure at all n locations
cactcgacccgngacctctgagtcacctgcaggtatgttagcttattttggtccttgatcgcaaacattctcttcatgcgctccgcaattgggagataccacaccacctttgctgggcctcccctctttgacttacttccttcaccttcactctttgatcgtttgtatcctgatgccccacagatagggcaacatccaagtcagcgtattccttataatacataatgcagtcgttcggacatgcatgaattcttctgacctccaggcccaacggacataatacttgcttcgcttcatatgtcgtctgaggtaaattgttcccctctggcaacagatcctttaacagctcaaggagttctgtataactcttgtccgaccagccattactagccttaagcttcatgagttccaacacgcatgacaac

SEQ ID NO: 74030 - DNA, 244 bp, Oryza sativa
  unsure (1)..(244): unsure at all n locations
tttttccttttttancacagaaccgtgcatcgtctcttaagaaaccatttaaactctataactagcctacataaacctttaaaaatcaaagggctatctttgaccctcctgcttataactctaaaaaccgaaacttttgaccaaatattgagaatacttatcaataaacctataatatactacttaagaatcctaaactcgataatttgcttgccatcatgaaaaaaaaatggcacgaccaaaa

SEQ ID NO: 74031 - DNA, 469 bp, Oryza sativa
  unsure (1)..(469): unsure at all n locations
actcggacccgggatactctaagacgactgcagcatgaagcgtttttttctcatgttacttgtgaaaatctagcagaaggaactttagattttaacgcattgtatcttgatattaaaaagatataaacatgccgttgactagaggcgtgaaatcgctctttatacccaaaatgaacaaaccaatatcatatcttgaattcgctcacactgataaggtggtagctactagctaactcagtagaaaagtatttctgccatttgattttatgcaatatgcctactgagctgagaagtcgtactataaatacaattcacaacataaaattggcactatgagaaggtctgacattcttctcaactctaggatccagcggaagacttgaccaaacatgtttgcatggngagagtattctaaaccagaatcacacatgtcatatttatactaaccacgaacgtggagtgtataagt

SEQ ID NO: 74032 - DNA, 221 bp, Oryza sativa
  unsure (1)..(221): unsure at all n locations
aacacngccggaccaacacgagagcatgttggggacaaccaagagaccggcacaaaaaaaaaaccgaacaaagaaagcacggaagcagcaagaaacgcagccagcaggacgcggcaaaagaaagaagcaccacgagcgaaagacgaaaccgaacgaaaaaaacaggaggaaacgccagcaacaaacacggacgaaaaaaacgcaaagtaacaacaaaaaca

SEQ ID NO: 74033 - DNA, 379 bp, Oryza sativa
  unsure (1)..(379): unsure at all n locations
aagggaatataaaagaaatttttttttttttttngaaaganaaattgttatgtgttatatttataatagaaattaaccttcttaaatgtgagagttaggtgtattttgatttgttatttatatattgttaattgttatgttatattaggggtaagtttatttgaggatttagttagttatatttagttatggtgtattgattggatatttattgttttatttgatatttatttttgggtttgttttttgatttttttttttttattgtgccccggggggggccccccacaggaaaagaaaaaaaaaaaagaaataagcccccccccccccccccccccccatgagaagaaacccccccccatgtttccccctctttttt

SEQ ID NO: 74034 - DNA, 338 bp, Oryza sativa
  unsure (1)..(338): unsure at all n locations
taataantggatcatgcaactccttcatatacttccaatcaacccactgcatgagaatcgtccccttcttaggagcaatcactgtctcataatagtcctgctgaaaaagttccaaaaccgaggatcagtggacaactgatgatattgaaggatctttcttacgctctttctccacttcaatccacttgcggtttcagcttgtgactctccgatgataattaggatctctagagggagcactgacaaagaaaggcccttcttcatgagcggcttgctgagcggcaatgtcctcttttaactgaatctctttctcgaggatggagcatgagaaccactat

SEQ ID NO: 74035 - DNA, 418 bp, Oryza sativa
  unsure (1)..(418): unsure at all n locations
agcttctatttattctgtanggtgaaatatctcattttcctttggcaagaaagatgatctggatcatattcatcttttgttatgtgtgcacgcattgcaatatatcatagcagctggtatgatttgaacaaaatttgctaacaaaccctgaactgtaaaaagcttatgttgtctgacttccttgaaatgtcttcagggaagtttttgttcagtcgattattatttggtggctaaagcagatttcaaaaacctaatgtgcctattggattgaatagatctccactggtttctttgatgatgtntcagattgctgtgctggcagatgatatcttgaaaaatgttgagtatgatgctctaatggtttgttttaacaaagtccactcggtcatatcattcaagcccacaatgacaaccatac

SEQ ID NO: 74036 - DNA, 391 bp, Oryza sativa
actcgacccggacctcatatccaccgaagcagcagctttgagatcctacctactaccagagggataagacatggcgctcctaggtctataaccgatgttgctgtggaatggcgtccctgccttactccggtgatatatactctgatttgaatgattccagaccgctcgcccatgattaagatatgcctgaggctttgatgaataattcgactatacttcgagtgagtattggattttgtccgcccggaattcactagaatctccgaactaattgtgcataaaatcctgccacgaatagccgaggtcacaaactgacaatgaatgtaccaatcatcatgaaataacgtacacacttacaaagaaaagaaacagcacggaataacggctacta

SEQ ID NO: 74037 - DNA, 335 bp, Oryza sativa
aatatctggcaatgttagctgcggatcccttgtggcatcttaatgatgaaagtgatcgctggacatatgtttggggcaatggtattttctctctcaaaattagccatgaattttctatgtcgtgtgcctgattattaaatggattggaagacattgactatgaagtcaagtgtttggtggctttcttgatgacggttaaacttagacatgtaaaaaaacatgtgccttaaggcttcttgctctggacttgttacagatcaggaacactctccttattttcagtgtctttacactatgtggcgcattgtgggttgcatttctttacttgggaatgt

SEQ ID NO: 74038 - DNA, 387 bp, Oryza sativa
  unsure (1)..(387): unsure at all n locations
agcttatctggtatagaccacaattaagaaggatatggcatagcaatttatctattaattaggcagaatcaattagtttctttttatttntagaaaagattgtttagagtccaaatgaataagctcgacaattttacgctgcagcgaagtgtccatttgctttctggtttatgtttcaactcgatcgctccgagctagacaatcacgaaatcgcagcccgtccttcgtggtatttagtaactttcagtanacctccacgtgccatttgtttttagctgtgacgacaagttcaagccatacgttattacaaactatttgatatatgcattggagaataccaacangaatttaagtagcanaagggaaaggagagtcgtcggaatatat

SEQ ID NO: 74039 - DNA, 413 bp, Oryza sativa
  unsure (1)..(413): unsure at all n locations
agcttgttcttttgggcctttnctgntacatcctgattgtcgttttaggatttataaattatatttataatttatattaaatgttcattaatttacaagtgaagttagatgtgggaaataaaattttctaaatataaagcatgattggattntaattttataaattctccatgattaattatactctctgaaattttctcggatttttcagagctcaattcttaattttaataatacaaagagcatttcagagattatttaaatattaagctagtaattaaatggtttgattataatcttgttaagtactttgagtgttcaattagcttcaggagttttctttgaaattattgagcattggaaatattttaacaattcgaagatcattaatttaattacaaaagtaaattaaa

SEQ ID NO: 74040 - DNA, 208 bp, Oryza sativa
actgccggactaacacgcgctgagtttttttttttaaacaagcggaagagtgcctatgccaactaaaatgaacgtacaacgcaagctagaagaattcaccaacaaagttgcaaaccttatgctggacttagaagactctctgcattgctgtgtattatgaaggaggatctgtgcaagtaggaggactacaggactaccaaatactaag

SEQ ID NO: 74041 - DNA, 331 bp, Oryza sativa
  unsure (1)..(331): unsure at all n locations
agcttattctctctattnttatatactattaatgactgaggcactactattcactttgctctatgatgcattgctacagnttaaaaaataatgtaaaattcgtgtgctcggtttaccaagtatattgtttggttaactatgcactgctcggagcatatccaataatatagcactctccccgtttcaaaatatataacaccgttgacttnttagtacgtatttgaccattcgtcttatttaaaaatattaagtaattatttattttttttcatatcattggatttatttttaaatatactttcatatacacatatagttgtacatatttcac

SEQ ID NO: 74042 - DNA, 443 bp, Oryza sativa
agcttgtctactctttcacaagcacaccgactaggggtataccccattaagttctcatcctagaagaagcaatcggaacccgcatcactcaaagactaagactaaacctgcaaacaaaaggttatatcaacagcaagagtcagtacattaaacaagttatgtactggcaagcacaagtcaatcctactatactacatgtaaagcatatattcaaaggaaggcaatatgtagttcaatttcagcatatagcaagttttgttttgcaattcttttgtaaaggagttgatgcttcaattaacaaagacaagttctaagtttcattattaacttcttcataattgcatcataaacaatctcttattgccatacttaacaataagtcataatgtgtcaccacatacacaactcaacacatttatcaatgtcgaaccaatgtcacatga

SEQ ID NO: 74043 - DNA, 273 bp, Oryza sativa
aagttccactctgtggctgactgttggctctaatcaaacctgccctcaagaggattaatactaactcctatcctcttgtcctctacacaatcatttttactgactttctattactcgcacagtacatccataggaacgtactgtgctatcattagtacactgaatatacgtctaacggacttccaagtcgactctatggagagggtggccatctaatccattgtatatccctagataatgtacactccatggaacatgtaggcatatgcatta

SEQ ID NO: 74044 - DNA, 311 bp, Oryza sativa
atcatcgcatgagccgatgacatagaagaacatggaggacgtgagatccatcgagcacgatacggagactgaacgctaccgacgatgatggcgttgaactacgctaagagcgcgcacgtgaagacgtatgttcgccgctacgacgcctgcagcgctgtgcctccgacctgggcgcccactgcttcttgtacagctactacttctcctacgtctgcatcctgcggtacttgctctttgtcgacattgaccgcgacggcggcctcatcttgacatgggaaaggggcgttgatgctgtggtaagcagcttgatg

SEQ ID NO: 74045 - DNA, 287 bp, Oryza sativa
  unsure (1)..(287): unsure at all n locations
ttatatgaacagaaaaccatcgattcacgaatctgtggctccatgatactaatgtttctctcttacaacaagtacatctacttatctgacgcataattgctgcttccggttcccagatgaacacttgttacggatgacgcgcagccgtgctacgtaatgcgtagagctctgtccagaattccctcgaaataagggttacatcctctatcattactcatatccattatcatcactaacgcgtgtatcattaagagagtgggagtcatctatcatngactggctggctc

SEQ ID NO: 74046 - DNA, 437 bp, Oryza sativa
  unsure (1)..(437): unsure at all n locations
agcttcttttttgaatgtctgcctcttgcccaaagatggccgcactgagaggttgctgaagaactactccaggtggcccaatttaatcacctttctccccaattgcaacaaaccctatgaacaatagatggtactcctactacatactacaatgattgctccacataagccaatttatcatttagtgcctgatgggggcgactttgctatactactaattttattcagaaagtgtcgtactttgacgtcctagatagtatcatcctaacatgatgttctaatctgcgaaataaacctcaaattgacgtcccatcaaggtgacatgtcaaaggagaaaaatggcaaaacctgtggagtgcgacgtgtcaaaggagataagcactgtgagcaaagcaaaggcgatgatccaagtcatcaccgngagcaaattcatgtgt

SEQ ID NO: 74047 - DNA, 396 bp, Oryza sativa
  unsure (1)..(396): unsure at all n locations
agcttctttatctntcggcacctgaatgagataatagacaggtgaagtgatactgagaggaacatttaagtttaagaaaaaacacttaactctggcatattacatttgtagttcctttcctttacctgttcacttaatatccctgagacagcaacattccaccagatattgcataaccaacaatgtcctcaaccagctccagcaggggattcatgagtatatttgcggcaacaatgtcatatgatccttttgacgacttcaactcaaagttaccagtgggcctgttctcttctgattagcaataatacttggagagcatgcagactgaacaatagttggtaccaagttgacaagcattttgtttgaattataccattcacatcatattttacaagc

SEQ ID NO: 74048 - DNA, 417 bp, Oryza sativa
  unsure (1)..(417): unsure at all n locations
ctatgacgggacctacatactttatctagttcatagttgaagtgattatcaccggacttgctttactttgatatggcactagaacaaanatctcatgtagaggcactcttatagaagcgtttggctaattgccttaaaaccatgagttctatagtgtagagacactctntagaagcacatgaaaaatgtctaaaaatatttcactctagaggcactttagagacattttttcagcacatttttttagagacattgtgtagaggcacttttttagtactttgaaatgtgtctaatatgtaaaggtattattcttgagacatgttaaactctttagagacacttcttagaatgataatgtacactaaggggactaaatataaggtacacaatgcacaaacatataagtaatgatatggg

SEQ ID NO: 74049 - DNA, 368 bp, Oryza sativa; identical to SEQ ID NO: 74027

SEQ ID NO: 74050 - DNA, 456 bp, Oryza sativa
  unsure (1)..(456): unsure at all n locations
tactcaagcttcgtcgctgcacncagtagnccgcgtgcccggttcggccaactgaattttgactaccactagcctccgggtgttgttgccctccacagtcctttccacgtgcccctggtggttcccctccgcatgcctctgcacgaatccttcctcgttcaagtactggtttggatcctcgtgcgcctcaacatcattccagaactggctgctccccctcgagaatggatcgaacaatatctgtttctcatcgtgggcaggcatctgctgatacaagacacatctgctgaggcacgagacatttatgctttagcaatctaagtcatgtctgctaagtgtgaatggcgtacattagaaccctacacaaccttacgagctgagtctaatttcaaatggagatatcagctaagtctaagtgacgtatattatacatccctaagctggagattattatat

SEQ ID NO: 74051 - DNA, 291 bp, Oryza sativa
aaggtggcgatgcgttctaagtgttatcgaactgaatcttgtccgaaacactgccttggcgtatatatatacccaaaaaacataacatgttcctgtcggaaccgactcctattttattcaactcaagatcgataagttccttaggcggactttaccaaaattatatatgaatttcataaaataacttatttaatgataaaatgcctctttgactaatcccacatggcattcttatgaaccctaaacaaaccgcatgattctaaacccttacgaatccgtgatcgcttcctg

SEQ ID NO: 74052 - DNA, 456 bp, Oryza sativa
aacctgtacaatataatctcaactgcatatgtgttgcagtcaaattatcctccgatatcaatagttggcgttctaataccatatcagtgttccccgcacaataaaaataaaaataaaatatcagtgttattaatttttttgtacatttaaacccagacacattttgttaagaaagcagttgggcgaaccatgaattgataggactcacatgtaagaatttattgttcttctcgcttattgaatcttttccacaaatgacttgagcgattctcaacgtttacaagttctgtaaaatcatgtattttatacacaatactagtaactccgtacgtgccgcgcgtccacttctagtttacattagtcttatacaatcactgatacatgtataaatcctggtaaaaagatagataaaacaaattgtacaaaaggagacggcgacgcaccccatcgtctagt

SEQ ID NO: 74053 - DNA, 351 bp, Oryza sativa
gataccgacgggctgaacctggtctttctgactagttggatcgaacgagagaagatttgccaaatcttggtgataagtccagctgcgaaccaaaccctgccgggaggataccatgcttcaatgctgagaggaaccatcgactaattgcgaaaacttgatgctgccttactgcgcgcaactgtcgaacaagattcgcaatataaaatgggtggcttcaatcaggaagggatggtttgaacaagaatttatacagtcagcttctattcaaagtatcctactctgtcgggatatccacgatggtattgttgataactgaaaaaatccgcccaaagtcaggaccctctatattgg

SEQ ID NO: 74054 - DNA, 477 bp, Oryza sativa
  unsure (1)..(477): unsure at all n locations
ntatgaagcaggtctactttgtacatatgtatgtatagtatatgtttatatgactccttaacgatctattcatctattgctagtacgtagtagtcattatctaaaataatttagttaattccaatccatattaatctagagtgcatgcaagaacaattgagtgaagtgctctgcacttttttgtgcaaaagtggtaagtcagtaggtgcattatcaaacgggagtggcaagcacactatatattggttttgcatacgcgacagaaatggtgagcgctagcttctctcgccttttttttttcctaaagatcgaaaaactttggtgcatgcttatcctcagaagtagtgagaagttgcaagcccagcttttgataaagttgtaggatcaggttccccattntattgtcttcaattctcttcgactcttcaacaatatcactttgatcaggatggatattcaccaaaagctatatgtttg

SEQ ID NO: 74055 - DNA, 350 bp, Oryza sativa
agcttgatagtatatatgatctcctgagaatctctcctggactaaattgagaatccagcccaagagggagagccgggtgttggggaatgcgctctgggtgttggggaagccggtgacgcatcttccatgaactggcatggatgcggtgcatggaagcgcggaggctgcgccgtctatctcctggagtgtcgaaacatcgtcttccccgtcagtcctgcgcgcgcgcatgcgcaacacgttaagtgggtgaccgagttgatcggggtaatgcggatggccgcggaatgagtctaaatctgcttcctcaatacgaaatcgcgtgacgaactccgcagaaatgagatgatggt

SEQ ID NO: 74056 - DNA, 455 bp, Oryza sativa
acctgtcccaattgctataattctgtctcttaaaacttaaggaaaatgtaccttcttttgtttgtttgtcttgtaccttgtccttgtatagttgtcattgctgaaccatgaaaagaagggctcaccaggtgttcttgcaaacagagccatcttgcaattgtctctgtcaaataaaaagccccatgtaattgcttcataaatatggtgatacaattgtaggttccgctggtgcacgacgtgggactgtcgtgtttattcacggtgctccatctcagtcatttagctatcgtatggttatgtctcaagtcagactcatttatcttgcagcttgttggactaaacttaatttatgaaacaatttgttgttcttgatttgcattaccagacagaaaatatcagtggttctggcttaaattagtatgtgggtctttctaaaatatgttttctttcgctgc

SEQ ID NO: 74057 - DNA, 356 bp, Oryza sativa
  unsure (1)..(356): unsure at all n locations
agctgaagtattntcattttttcaatacattagcttgagatcttagtgtgtttttcncccattctattctcatggccctgcgacgcccgcgtgttgcgcatttgtttgctccctctgtggtaagagcccaacctctccctcatctacatgaacgattcttcactaagtgtgggggctaagttttctagccttatcctagccttaagttgagccccgggtgccgtcgacgcccgggacccagtgtgtaggctctttcgtaacggctggctttggtcccgcccggctggttacggtacccgtcctgtctcaactgtggacggggattgctggctctagaagtttctgctctcacactc

SEQ ID NO: 74058 - DNA, 467 bp, Oryza sativa
tcgcgtcgaaggtgcccttataattaccgggagtagttactctcttgttatctatcgatcgttcaatggcctcacaatttctcctagtagatcgggtttaaaaaataatttgtcagtttattaaattgcttgattaggggttgcatacaaaacagattccttcatatgggtttctatatgcgtccatcttctgctcctccagataggagaccgattaattaatggataatgattggattaactattgtatttgcggcgacaaacgctcaacaagatacatggctcattcgaattttttcggaaggcagcacatctctgctcgtacaaaacaaactccaccatgctcgtaggaaggattggcatgaaaagttggcagaatatcttatacccttctgtcactagacatacatacacgcatatatatcttatgtttctttttttattgtgaaattaaaaacaatgttgta

SEQ ID NO: 74059 - DNA, 346 bp, Oryza sativa
atgcatttgtttatctgcagtctaatgttctattaaatagcacttcatgtgggtgaaataatctctgaattaccctaatgacaggcatcgctatcatgtgctgaaggacctccatatcatgcttgctaaatattgcacgatgatgcatggctgccgcagaaaaaggagccacttctgggtcatccacaggttgagcaaggaagtttatgttgtgtgcaatccagagtgttctctgctctggcatgatgagacccatgaaggcttgcctggatagctcagctggggatgaaggccaccactagttgataatgggcagaactaacgctgctcctgcaagcctgcacac

SEQ ID NO: 74060 - DNA, 468 bp, Oryza sativa
  unsure (1)..(468): unsure at all n locations
gtgctggaatacacctctctctttctggatagagtttttatatcttatgataaataaaaatagcaatggtgaactagctgaacataatttagttcaacagcaacaacatgaacaacttgccagaatgggaaaactaccttgccagcataaagtttctttgttgtgctcataacaaaaatccattttgtccctttaagaccctggcttgtatcaagtggttctccagagtgcttatggataatcttcccttctgtaactatgtattcatagagctcacgctcttgctgcaaaaatccagaaaatatagatttcatgtaacattatttcattaaaataaaatagtttcatgctgcaactttctacggtgtcaaatatgaggatgagttagcatgaaaaactgaaatattgtgtgaatggaagtangccacggtatgctactagttgctacggtattatatattgatagtc

SEQ ID NO: 74061 - DNA, 372 bp, Oryza sativa
agcttctgtctatttggcgaagaaaaaactagtcggataaataacagaattaaaacaaatacaggttaaactaagtatattaggcataacaagcgtttcgttcttgtagagtagataattggattttgattgagttatttttctaagggaaaaaggaaaaggaggattcaaaatccttttttcttcggactttcccaaacacaaaatacctccttgtattcgcactctcaaatgagagtggaagagattcgactttcatataatatcttaatagaattccatgtaatgatcaatgcaatttttggattctatattattcgcatgtctagaatcctaccaagagaataccccccatttttatgtaattgaagt

SEQ ID NO: 74062 - DNA, 476 bp, Oryza sativa
  unsure (1)..(476): unsure at all n locations
tactcagcttctataatatggccgtgatctgtcattacgtgcgactatcttcttatatataagaaaataagaaaggatcaaattttctagtatttactagaaaagggggctttctacatagggatcgtcaaaacaacgattttgccctatcagctgtaggaagaaaggacacttcacgagaatcaaaataggaagaaagaaagtatggcctatactactctatggatagagttctcaaattgatagagaaagcaccgtaaagatcaattagtgaccgactgggtcgatacaactaaaaaaaactgcttacttatcccatgatatggggcaaaatttaggaatccgcttatgtaatagagccgatccactaagggattaagcagcggtgtagtatcagatcccaaagatagtaagttcttttttcttgcttatggngaaaaagtctttntcaggattctatagaaatttcatatatg

SEQ ID NO: 74063 - DNA, 124 bp, Oryza sativa
cctaacggtttagcatatatcagttgctatgaggagaacacatatggctgtggtagtaatatgaatttggaggcttgtggagtataaatcggactatgtatgcggctgctttctgatattattt

SEQ ID NO: 74064 - DNA, 364 bp, Oryza sativa
  unsure (1)..(364): unsure at all n locations
agcttttatgctttatccaccaatcttctgttgattatttacataataatctccgtggattatgcatctccttttcttactacttttactctctccgtcaaaatgacacgaacctatgttcttctcaatatccgctgcatcactattacacatacgggatcagtgtaattgcttaccaattactgtatctcacagatgtcgaccaatgagatctctggcagcaatgagctgtgtgctcaagatccagaggtcatgactttctataatcttcgcggttctgataaaaccacaatcctgaggaagaaagaactgcagaggctgagaaaggaacgcatcgaatacaagtgctntagaaagaaagaga

SEQ ID NO: 74065 - DNA, 485 bp, Oryza sativa
gacctataaaactcagcttgtccacatgatggacctactgctagatcagcaaagctctatatgaagaatcagtacagggggatccgccagcgtccctgtggcaaatgggcagctgaaatccgagaccccagcaagggtgtccgtgtttggcttggaacatataacactgctgaggaggcagctagggcatatgacgctgaagcccgcaagatccgtggcaagaaagccaaggtcaactttcctgatgaaccagctgttgctcagaagctctccctgaagcaaaacgctgccaagcaagagaaactagctccacctctgaagacctgtggcgatgatgctttctttcagctaaacagttcagacaatgatttgtttgcaatgcttgcaaaggtgcctgcaaagccggcagagcctgttgatctcatgcctccagtcaaacctcttgcttccactgagacattcgagatgaacatgctctctgatac

SEQ ID NO: 74066 - DNA, 423 bp, Oryza sativa
  unsure (1)..(423): unsure at all n locations
tcttttataacacaagttggggttcctggtgtgtctgttctggatatattgcaaatcaatatttttatatcagctactaaatgccaatgatgtttgaaaactgacatggcaccttacttggtcgcattgacgaaactagaataatgttccatttaatttcagcgatatgtgcagntcattatgaattctctaatatatgctctgtcaaagcctatgagatagttgctagacacttataattggtagggtcgccaagatacaagtacaaagcaagagatgttcatcaaaggatacatgttgttctgtaggtaagtggcttttcagtttgctaagaaaacttattggagattctagatgtgctacttaattcactgaagtggtatctatatagattattttcacctcattatacacgagttcatg

SEQ ID NO: 74067 - DNA, 446 bp, Oryza sativa
tgcttgagttattctcaaatgacaaaattttatttgcattgcaagtatgagcaacttgtggaagagggtaggctgctaaaggtatattcaccaagacctttctggaacgtataatttctgttatctttaacagtataggatgttgcggagctgctcctgtcagattgtgcaagcatggttccaacttccaaatgttggatgcctctaagacaggagttccagtttgtgaacaactaagatattaaaaaaatttcctagattttctggcaaaatataagatattagccagttttcaatggttgtcatgggatgctgaacctcaaggaactattcccatccaagatctgggactctgcttacaaactataaactcaaacatgggtttttgttctttacattctataacataagctgtattgtccacttgtgttttgaacactatatct

SEQ ID NO: 74068 - DNA, 303 bp, Oryza sativa
  unsure (1)..(303): unsure at all n locations
ctatgaaactcagcttcataagccgcctcctacgcgagccaggtctatgatttaatgacngccganacngcggcggcggcggcggtggaatacctgtgaggggagctcgacgaggacgccgtcgctgctgccgccctcgtctgactgtacccggacgcgcggcggggagcggcggatcgcggaggaagaggcggacgacgaggatgaggacttgggggaggagtcggagtcggagtggtcgcccatcgcggcggccacggcggcggcgggcggcgctggatctgggcccgggggggggggtgg

SEQ ID NO: 74069 - DNA, 420 bp, Oryza sativa
  unsure (1)..(420): unsure at all n locations
agcntgatgctctctgtgagctaaatatatcctatgtcctatatatccttaacaattcatttcttcttgctaattattaatttcagctgtgcttattttccatctacattttgttacaaaggctatataatatcaatgttctaggttgctttcctaatgcttgatcgtttgatgtcaaaatatgaagggattactgtgtgaaaacttgtgttcctgtatgtgattgtgtctagtaatgtatgagatactaagttcaaataaatatcctgtcttttctggacattgttgagttagtaactgccattttgtaatgctatcaagagctccgatgccttttgagttctaaagagaatattagggctgaatgagccttaatttctttactctgcaatatttgttaatctagtcatgctgctcttc

SEQ ID NO: 74070 - DNA, 486 bp, Oryza sativa
  unsure (1)..(486): unsure at all n locations
ctaagcttcanagaatcgcaatgtatgtggtttaatccagcacagtggatatattgttcctatgttggaccatggggcgtcacaatccattcatgtgcttcatcaacaaaactagtaagtttgttccgcatcaagtcattaatcaactacagcgtaaaaatatctgaccattcaaaataatgagaaatgtcaaggacagaagtacagcaccctatggaaatcactacaccctcgaaacacatttcacaaccatctttgccaacatttttaacaggtcaggacagcagtacagcaccattttggaggaaattagcatatcctacaagtaagtaccttgtatgctgtagcaagggcagtagctgcctcctgaattgtcaaacgaagagattgctcctctaatcttaaagcagtaaagagtcgtatagccatgtcagttttgttgctgcaatgttcataaaaagtagaacaaatcagtctccataacag

SEQ ID NO: 74071 - DNA, 446 bp, Oryza sativa
  unsure (1)..(446): unsure at all n locations
agctatgtgtttcatcaatggccgccattctcggacgctcccgccatttacttggaggggtcaatgtactctcttctctgcgagaaagctccatgacaattntggaatacaaggattcttatgcgttaactagacattcaaccagaaagtatagaagaattcttctacgtctactagagattcaactagagaagaaaatagagactgcggaggcggcgctgcgtgccgccagaatcatggaagagcggtaggacttatactacatattttacaaacgaancatatactgcctccgctttttttttatagatgacgttattgactntttctcacatgtttgaccattcgtcttatcaacattttatgccgagataagatataatcacattaaaatactatagtgataaaccactcattacaaataattatattacgtaactctttga

SEQ ID NO: 74072 - DNA, 472 bp, Oryza sativa
taggacctataaaactaagctactgaggattaacacactggagtactctctgagtcctgatattttgattggtttcaactagtagaaactttacaaaaagaagaatagtgaactgtgtaccatgacatctatgataacatatgaactttgttgccaaattcgaccatatctggccaaattttacagaaatttgtatttatttattcatgctcttctgtaacacacttgtggtttctattagtcctgaagccctgattggtttcatttagtaggaatttcacaggaaaaatatactgaaccatattccatgacatataggaaaacatgtaaactttggttgccgaattcgaccatatgtggccaaaacttatagaagcttgtctttgtttattcatgctattgtgtaaattcatcttaatgttgtatataacttattggcacgttaaaggaaatcgagacatgcaataagtca

SEQ ID NO: 74073 - DNA, 254 bp, Oryza sativa
tctcaaacgaagaggcgggattttagacttcaccatgggattactattgtgaagaatgattttaaaactgtgcaaaattattttgatgtgataggtagaattgctcattccacatacaagcatcgatgttcaatttttcatccaacagaacaaatcttagttcaggttaaactttaattcaattcaagttcacacatgaccggctaaatttctggttgcacacaattattaaagtaccccattttatataacac

SEQ ID NO: 74074 - DNA, 489 bp, Oryza sativa
ctataaaaatactaagcttcttcgtaaggagctggcctcttacctaccagttatattgtttgtgttttatatgaggtggatttacctgcgggacttccaaaggagattagagacaggcttgaaaggagacccacgcgaagagttctctttctcaagtttcttccctgaatttctaaggtagtccaaatctccctctttatataactttgattgatttgtagattggaagaatatcctgaccaattaattgaacatgcagacctgtgctggatccgatagcttcaatattccacaggcttctttgtggaagatctgaaagggctgatgctagaggtcagacattggataccacacctttgcctggttgatattctattgaagcgaacagaagaaagctggttttctttctcactctctctctgtcttgattagagcataatttcatccacacttgcgccatctaatgaataatcaatatttgagcctttg

SEQ ID NO: 74075 - DNA, 366 bp, Oryza sativa
  unsure (1)..(366): unsure at all n locations
tgaacgatatgttcaaagacatcaattctaaggcccacttcgcaatccgtccgtttgcttcgcgattatgatgtatatccccgagtggaaacgatgtgaccaccgtgaccgagtgactttgaaagtagtgagataattncgtgacggtaattaagacaccatataataacttctgaacctgaggataccttgtcttggagtccgctaaaaccatactgacagaataaattgggcggtggactttttgaatatggccttcctcgtaacgctcaacaaccaggaccgtgcttcacacctgggaagctgtcgtcatatattacacgtaccggctcttgagatgctgcgaggccataactggtggagtgg

SEQ ID NO: 74076 - DNA, 410 bp, Oryza sativa
  unsure (1)..(410): unsure at all n locations
ggatgcaaggcatgctgcttgcccnccctgttctttcaagttgtttggctgagtgtagatagatcgatgcttctgctgtgtgtggtaacttttatggtactgatgtgctttcttctatcttcttttccctgtacctagatgatccatggttttcagtactttgtacatcggagtcctgcagcaaagctttaaacatcttgtttgatattagctgccaacctgngcgtctcctatgttgatgtatgatagagtctctgttcgtgttgctcttgtgaaattctcaataagagcaccacattttcaacagtgctcattctgaataagtgctactagtgttcttgatgtttctagtaaaaaatactctctccgattctaaatatttgacgctgttgactcttttaaatatgttt

SEQ ID NO: 74077 - DNA, 452 bp, Oryza sativa
  unsure (1)..(452): unsure at all n locations
tgtggcaatgcaattctgaacatttgcacgagtggcattgtgtattttcatgtgatgtacgtccatgaaggcgaagatgtactcggngcttaattccatcaagaaggtaaccaagaactacacgctcaagggcacaccagcagacctgacgggtatcttgcagcaggttgttgaactctgtgctttgcatgtacaaatcctttgtggctctgtattgaagttcagagattctcttgcatcttggttctgatctgtcgttcgctgctcatcgtactctggtttctgttcagggtggtatgcttgtgttcagagggaaagagttgctgtactcatggaaagacaaaagcacgggtgatcatgctcctctggatgatgtcctcaacgcttgctgcaatcgaacttcttgaggtctctagcactcggaagatgtgtatgtaaatatatgaaatgct

SEQ ID NO: 74078 - DNA, 465 bp, Oryza sativa
  unsure (1)..(465): unsure at all n locations
ctcagcttttctgaaacccattgctcctcaggctggaccttattacgctcacgacttcccngtaccattagacataattgagtctatctcactacgtactgcttccttccagtagtcagcgtcaggagatgaatattgtcacgtcctggtaaattcatcccgaaataaaaaaaacattctctaaaaggaataatagaattaattaaaattcgaaaagaaattggcaaacattaaaatgcgcacaagaaaaattcgaatgtggccggagaatttttgttaaattctccttggtctaaaatgagctctcaaattttacttgaattttcagagcaccgaaaataattattaagcaacaaaaacaattatcacaggttattttaaattgtactttaattatttacttagtcaatttactttttagggtttattcctaactaattattcattattcatgatttataacct

SEQ ID NO: 74079 - DNA, 363 bp, Oryza sativa
  unsure (1)..(363): unsure at all n locations
acaatcaaaaccttaaaccaaggcttaatagcgcgcattgaagaaacacacctaatgcaagaatagcattgaaagggcaacaacagatcggcgaagcatcatgcangccatgcattatttggaattgaagcacttgccgttgggaccagacagtcccttcagcttgagctttggaggaggaaggggaccaatggaccattggtcgcgcagcctgtgatgggtgccacaactttcagtttcagttcatctcctcttgctgctgctcccattatttggaccacacanaggggaaaaaaacatgcacgtgctataagtatacgtatgtatgtacatctatgctgcacaagtatcatcaaaaacaac

SEQ ID NO: 74080 - DNA, 483 bp, Oryza sativa
gacctataaaactcagcttaagaattatcacatggaagattcgatcaagtcacaagttattatcaatcagatatttatacaacagctagataagtgaggaccgatgatccatacacataatgcaggaaacacatcattttgatacttagaatcattaagaaaaagaccaaacatggaaaggaatgccaagctgccatccaaagaagaaaagaaaactacctcctggacatagtggcttgtcaaaatcattgtgctttggtggttcacttgagtagaaggcattactacggggaagctggcaccggaaaaccttcacgctgtaacccacagcagtcaaaatcagcacaacaataggctattagcaaaacagctgtagaacttcaattcaccttctacacggattgccttgtctatgtttccactggtcgtgctggtctcggagtaagcatgccattgacgggcacatgaacatgaacaaagtgc

SEQ ID NO: 74081 - DNA, 296 bp, Oryza sativa
ctgatggtgatcataagtatagaacatcatcactgatagattgaattcctggcaaaagaatatattttgggataaaccatagccctgactttattgatcacaaatctttccaaaacatacaagatattccattttgcacagatcacgccgagatgcctcttataatattctacaaactgtaaacatctcttcaccaaaaagaccctctatgagtacaatctgaagagggtctgcagtgtattaagtattctcaatcatactgactcaggaacaagatatctattatagaacttatg

SEQ ID NO: 74082 - DNA, 474 bp, Oryza sativa
actcagctggaagcggatccgaatgtccattttgcaaattgtttattgtatcatcgcttcgaaaacgtggtgagggaggccctacagagtctcgagtcttctaaactctaacacgagatgtttacagtcgattgcatttcagtttgacttttgaacctcttgtgtctgcacagaaattgaacccgacaagtgtcctgctagatagtttcagccttgatggaagccacatgctatatataaaccaaacaagctaggttagcgatcaaataaccatgtccaagctgggccaaatagttgctaatcctctgtaccgacagaacatgcccccgacacaacaacagttcttggatagagaaaagaagtttctcgtccatcaatgctaaaacagtgaacagtctgacatgaaaaaacatcaaaagatgttgcccaggtaggtcaattctgtgagaagctaatcattagcatcatagtctc

SEQ ID NO: 74083 - DNA, 66 bp, Oryza sativa
tcgacccggatcttaagtgactgggctgcagctttttcttaacttgattggttgaatggagacata

SEQ ID NO: 74084 - DNA, 473 bp, Oryza sativa
  unsure (1)..(473): unsure at all n locations
tcggtaaaccanaactgccttctttatatataggtagctctattacaaaatacagnntatcttgaagagttctgattgagacaaggaatttacaactaattgaacatgctaacatttgacatatcaccaaagcatggcacatgagctcacaacacaaataaacaaatttggtccccatcccattgcatgtcatgctaagacatatgacataccaccaatccttgctataattgtgaaattatcacactaggctgttttcagacattacagtccgaagctgaactcgtatagcattccatagtttcacaaatctgagattctccatcaacattaagctctttttagagaaactttcactacctaagtctgcacaccaaccaaccagttaaatctagtatgaaacatattgagtcatctatcatagaaataactctaccctcctaatgccctaaatgagttccaatccttacaac

SEQ ID NO: 74085 - DNA, 283 bp, Oryza sativa
aacacccgccatcgcaatctcgtaagggtgatcaccgcatgctcaacatttgatccgacaggacatgaattcaaagctcttgttcttgaatacatggttaatggcaacctagaatgttggctgcatccaacatcctacaagaatcgtccgaggaatccagtgaggttatctacaagaatagaaatagcattggacatggctgctgctttggaatatctccataaccgttgcatgccacctattgtccattgtgatctgaagccaagcaatgtccttctggata

SEQ ID NO: 74086 - DNA, 473 bp, Oryza sativa
  unsure (1)..(473): unsure at all n locations
ggcaacacaatccaaaccatcacttggttcggctattctattattgtctaaattagaaacacaatccgaaccaacacttggttcgactatattggtcattgcattatcatccaacttagtaaaacaatccgaaccaatatttgggttcggctatacttgttatatatggcatcattacataaattattaacacaatccgaaccgctgcttggttcacctatacattctattgcattatcatctaaactagcagtaaaactatggctagcatcttcaggccttaattgattatccttttgatttagtggcctaaagtgtgtaggcacaacagggttntgagagcgaacctcctgctggccataatatgcatcttgtgccaatccatctactcgatgaatttgggttggctcgtaacgactattagtgcaaatagcatgtgtatgtggaatagcatgactaacagatttaacatg

SEQ ID NO: 74087 - DNA, 408 bp, Oryza sativa
  unsure (1)..(408): unsure at all n locations
tagctttactcggacaatagatagcacaagttacaccagaagcagaacaaccgagtatttcactcttgggataacatcttgacgacgatgtaccatgttgctactccagtgtcatgtctatggtctggacgtccatgtacgttgctgaaatggtggatgtcaaatggtgggcagaggtagtgatcangtaccatttatgctttgagatttgctccggtccaacaacaaatatatcgagataccggtacctcatactatcaaatcatttttgattgttggatctagctgaccaggatgtgcattgttagatccaacgatcggaaacgaattggtaccatgagatatcggtacctcgagatactttntgntgtaccgaagcaaatatcttatgctntntgttgtcaccct

SEQ ID NO: 74088 - DNA, 438 bp, Oryza sativa
  unsure (1)..(438): unsure at all n locations
tatgtaatttctaatttaaaatgttgcagtgagtactgcnttttacagagggttcttcaatggtacaatttacctcaacatggaacaaaaaattcatcaactggtttaaagagaaggtaatatttatataattacatatatggaataaaccgtttcaaatatgtatatttgttgatgttatttttttaatctttttgccctgtagatatatcagcagcaccagcatgataagagtgaggtcatggaagaccttttgtcattgtcgcgtggtctgctgaagaatataacatgctttactggatatgacatgaatgggttcagatatcgcacagaaagacgggacagccacaggtgtacacaaaacagtggtgtgatggntcttggtgatgatgtggaatattatggagttttgacagaaatacttgagattcagtactt

SEQ ID NO: 74089 - DNA, 374 bp, Oryza sativa
  unsure (1)..(374): unsure at all n locations
cttcttgtttgagcaagagacgaagtcgccaatgtcgctacaccacttggtcaagctatgttccttaatgacagtggtccgagtgcactngacgcaaccgaaatctttgactagctgagagtaacaccggatgtatacttcaagaatatcaagaaagctggaagtatgggagctagtatggcattggcgatgaccaaatccttgtacccgaggattgaaatgacgccatngatggctttgcagacgggacaagcgaagaagctgctcttgatcttatcagtaatgctcagaatgcagctgacaagattgcaagtgatgttgtagagcaatttcgcaacaacgaccttcagtcgagcaataattactctgatgat

SEQ ID NO: 74090 - DNA, 438 bp, Oryza sativa
tgggatctaaggctcgtcctagagcaaggaggctcttattcttcttgtcacgaccggaaataacccaacgggcgttccttacgtgcgtgcattattccttgtcccaggaggcaaggtacaccaaaagttgatacaattcagagtttaacaagcggaagcgtatatagttaattattacatgggcaacgagggcccagcacacacgaagacaactaataacagcggaagactatggcgacgaccacaggcgcttgacagcaggcacgagctaaacaccaaagccttcatcatccatgagctcctcttctgggtttgggaaaaattgagcaagactgagtacaaccaccgtactcaacaagacacacccacaagtgcaatataaatgcaaaggagtacaacggagttatagtataagggttagggtttgcaataacagca

SEQ ID NO: 74091 - DNA, 410 bp, Oryza sativa
  unsure (1)..(410): unsure at all n locations
agcctgactctgtccctatctggcgcgccaactgtcgaaactagatttcggcaataataaaagggggtggctatcaagctaaaaaagtgtatgggtttggagacaaaagatttatacaggttcaggccttcttataaaagaagtaataccctactcctgtccggngatgaatccgccgagtgtattattgattgtatgattcggggaataatcagcatatgcccctagaggcgcccggaccccccttatatatgggaaggagtccggattacaaaagataatctatattcctaacggaatatgaagatagagggtaaatacagtcgtaaccgactaagtctcanggtggtttcttgatacacaagttaagaaacaaacccgagatacagatnagatattctatttacatt

SEQ ID NO: 74092 - DNA, 476 bp, Oryza sativa
  unsure (1)..(476): unsure at all n locations
ntgcttcaattacctcaatatgaatatatagcgccatacatataatcataagttggctcatgcatgaatccactccatgctaattaactatagccaacagtagtatatgagcgaatccagacaaccgaacaaacaaaagtctgtctgctcgccatttatgaagatcagatactgatctgctgcggcaagcaactatttttgttgcgctagaaattacgcaacttacttatatatataaaataaaagagctgtatacgtagtttatgtacacaccacgtgattcccaatctctaggagattatatatgatgccacgattggtgtggttgcgaaattatcagtgtatatatataaatctagcgattagttgtctaaatcgatcttgcgtggaagaggtacattattggcaacttgcatgcatacaaaatagaaccatgcttttttaaattggattgtttcacactaccaaaatagggt

SEQ ID NO: 74093 - DNA, 378 bp, Oryza sativa
ccgaatactgtgatggtggcaagtttctcagccatagagaatgtttgcgattctgacttctaatccgtcccaccgggcgcgtgtgtacatcctgaaaatttctgattaataaaatcactaaattttgaactgttaaacttttcatcatgctggatgttatgattgctattgcttgataaaccgtgaatcgtcacaatggagaaataaattaaatatgtacgaattacaagaatacattatccatatcattcccataaatattatgctcaagacatgaagctaaatgaacgaaaagttaattattaatttgtatgggctgaagtaccaaccacattttaatattcaaacctgttgaagcttggtttcattttaacaaat

SEQ ID NO: 74094 - DNA, 206 bp, Oryza sativa
gacacgacgacgggaagcacacgcacgtcgttatacgaaacagcgaccaacatctcgaacaataataggacaccgagtacccccccgcggcccttcttacgcaaaaaacaagagcacccaacacgagccaccgggggaaaaaccaaccatcgacggcccggcacaaaccacaaaagacccgacaccaaaaagaaccgggactaaag

SEQ ID NO: 74095 - DNA, 352 bp, Oryza sativa
  unsure (1)..(352): unsure at all n locations
ccgtcctcatcaagcacaagtccaggactgggtcctttcnactggcgacactggaacgcgaagagatcgaccattcctagaacgctgcctctctcaaagcgttttatgtctagaacggatggcacccatatcgccaacttgtaaaaatgtatatatcggtatgttagcccttcggtcagactaataagagaaataaaagatgaaaatgataaanagacaatatactagatgtagggctattatccaccacgaaggcccgaaccaggataanaactctatgtgctctgccttcttctatattgttgtgcgattgataatatgtggaaaacccccatgccaacgcctgatcagc

SEQ ID NO: 74096 - DNA, 475 bp, Oryza sativa
  unsure (1)..(475): unsure at all n locations
ntatcagtacttagtattacgaaaaatatatatgatacccgttcttttatgtgaaacatattaataagtatacattaaatattataattttattaaaatattatgcaaataatgtgagggatgattgttggatatgcttgcatgaggttaaataagtaattattgctactggttgtaggatcgagatgtcgactagaggggggggtgaataggcgatttaaaaacaaatgacacctaattaaaactaacctatgttgctaggcttggtgagggtcaactctaactaagcaactaagttatgttttgcaaacctagggtgatagtggctcaattatatctctatgaaaataaatcacactcctatgtcaatgtttagcaatcctaaggtgatatgatctcaagtaagtctctagaaatataaattgcacaaatgtaaatgcgacaatcaaatgagacaaggagacaagagactttt

SEQ ID NO: 74097 - DNA, 392 bp, Oryza sativa
  unsure (1)..(392): unsure at all n locations
ggctctttaatttagctttacgtatagagataacgcttaggaagaacaagacggaagaagaggggtggtggatgaaaataacccaaacaggaaagtagttcttagatattatctggggcctggagtatttatctttttctggtgcactacatgagaagatgtgcacactagtcatccttcatacgttggagtttggttcaattggctacacatctaattntacgcatgtnttgtgacttcatttataacattctgaggtctatcatataagagtatgatatctctttgatgcataccattggtgatttgatctaatcgcttcaacaatgtgaaggattttgcaccactcaaatcaggagtatacaagcacattacatgtggcatgatgggtg

SEQ ID NO: 74098 - DNA, 469 bp, Oryza sativa
  unsure (1)..(469): unsure at all n locations
taagcttcgcgagctagcaanacagcaaaccgcaggctgattatctatcggagcgcgtcgtgagctcgatgcactagtggaaatcaacttttctttttttttattttttgatatnttttattttccaggagcacaaaaataagcacaccacgaagttacagctcaatcggaggtgatatgggggctacagaagtttttgaaaccactatgaagaatgtacagaaacttgtgagctcgacagacaattttgcaaaccaaatttcagaattttgtattcgccaaaccctccgaaggtggggagaaacggatgtaaattttttttctcttatccgaaaagntatgggtgtttgaaggtaaggcttccgactagggttttcagaggggatataacctagtctgtttagcggtggtattgggatatggtggccacggagtatgtacgatgctctggtgatgcgtggtgatctgg

SEQ ID NO: 74099 - DNA, 287 bp, Oryza sativa
gatgaagtaagtggtttgcttaccattgacagaataacttgtggttccaacactgcatctttgaagttgacatggcgagtttacccgcaataatcatcgatacaggcactatgaactagatcattatgcgtaatgctgagaatctacagaagattcagactagaaacccaatgggttccttcattatagtatgttcttcggctggtataatcaagtagtattcaacatgacgctaatatctatggtgttactaaaaagaccatctggatcagagagtatctcaccct

SEQ ID NO: 74100 - DNA, 471 bp, Oryza sativa
  unsure (1)..(471): unsure at all n locations
tattaattttctaatcaaacaacatgtcatatccaatattgtattattgttgtatatagngatcacgacggtgaaatatcttcaattaatttcatcatttcaagtaatgggtcgtcaaaatcatttgcaattgctaggtatgttttgcattatagctaaggtctgtcattgttcataaaaaaacagatattatagcataaagggaaattgattatatttaaaccgtacttcagggttgataacataatatctttctataaatatgatcactattccggatctgagtggactcctacagctaagcaaaggtaatttctaatttaactcatgtttatcataaagtttctattttcattagtttatttaaatgattttacgagacaaaatatattatagaccaactacccattcaccatataataatagcatccataaatatgataagttaacccgcggcttggtgatagatgt

SEQ ID NO: 74101 - DNA, 174 bp, Oryza sativa
ttaacacgcagagaattttccgccggaccagcggcgctgttaacaccggcgcccgataatgaaaggcccacacaattatcaaatagcatactatttcagggaacatgacagagaacaagacactaaaaaaaacaacatgccacaagcagacctgaaattaaaagactaccacaa

SEQ ID NO: 74102 - DNA, 467 bp, Oryza sativa
  unsure (1)..(467): unsure at all n locations
tggtntatgtcacaaanaatatggtcaatgcaatcaattattattctaatgcgaaaatcttacaccaggcaccataggctacctatccatgagcccactctaaaaatgataggtcaatccaaatagtctactccctacatcttagaatatagcaacctaaaaccaccggatgtgatatatgctagtactacgaatctatacagaggtatgtccagattcatagtacatccaatccggttttagggtaatatattctggaacgaagggagtagctatcttgtcttggaaattcggaaacatttactgatcaaagaacgattttgctatatctcactccaaagattttttcttatctcttactcgattgtctcactcagatttacagtgtgttgtcttgtaagctacaatataatttatgaacattgcactgtaacttgtgtcagttacagagtaatgttctgaatctt

SEQ ID NO: 74103 - DNA, 450 bp, Oryza sativa
  unsure (1)..(450): unsure at all n locations
agcttttagtgtgttgagctggtccataaactaatgctcatagtangtgacaatgtaaatcattagtacatgatcaccaagtggcattctgcgtagaagtaccaaaatagtggggacagatgggcacgggctaaatttggcatcgtgcacggcgcaccagccgctaccaggggctttctttgaactgataaggctaacgggataagttacgctntatatctttcgaaagcggtcaatcggagttgttagaagtggcgggccatgaatttttggagccgaaagaagcgaatattaatgaaagacctaatatcaaataattagaaaggttgatactttgaacccagatcgtctcgttcaccatcttgtggagctagccggaagacactggacgtttcttcaaattttggagcccaacatatacgcagacataattganacacaatggaaagc

SEQ ID NO: 74104 - DNA, 472 bp, Oryza sativa
  unsure (1)..(472): unsure at all n locations
tatcatccacttgggcaaaacatatctatcttcccttttttaagaagcactngaatcagntgggcaaatgtatacttagcaagtcaagtttcaaatcaagtaaaagaaaactgtgacctcagctaaaattgaccttcgggatcacctctgctagatctccttatatcctgtttgaatagtgggaaaatttcgagaaactcctaatctgcaacttgcatcaaatccttcaaaagatatggtcccaaagtttccaagaaaaaaaggaccaatgcatttaacatagaatcttacgctcagatatctttgaccagaatctctagattagtagttcattttagttctggttgttttacactattaatttaatttggactataactgtcgtttattaccttcaactgctttacaccaagcacattaaattcctaaatttccttgtattttaaaatatatcattatttggatgtatcat

SEQ ID NO: 74105 - DNA, 261 bp, Oryza sativa
agctttcatgaggacaaaaaagatttcgatcctgctgaggtgcagcctctgatcattcactgcgctgagctgaccgactaacatatctacctacaggatgcagcaatctgcgttgcagcacccctgcgctgctacaggaagtagcatatcatcgcacggagggagctcgctgctgaagacttcacaccaaaagagcaagctcagagctaccgatggtgccctagacccctcgtgacgtatttctaccatatgttgcacaca

SEQ ID NO: 74106 - DNA, 429 bp, Oryza sativa
  unsure (1)..(429): unsure at all n locations
ggtcaagaatgctgcaagcttttgcttcttgatgccggtgctttcgataggacggttnttatgtacgccgaggacgccgccgttgatctgtgccgcgacgcacgctgcccaatcaccgatccgtttctcccgttagaagttggaggcgtcgtcgttttgctgctgccacgccgtggtggtgccccagcgaccaaacgcccaggcgggcgctctgctgcaatgctcacgaaagccaacaaaaattgttacagtgaacgtaaaaagaccacaaaagtaatttgattcgatccaagatgtactaaaattcaattcaagttgacttaaattcaattctagttctaaaatcaagcaaaaaagaaagataaaacaaagggagaggcgatgcaacgcaccttcatgcccaatgctccaccggcggtggcggaaccg

SEQ ID NO: 74107 - DNA, 473 bp, Oryza sativa
  unsure (1)..(473): unsure at all n locations
tcagcattggcaacaccaggcanaatccatcgccctgttttcttgcaaatcatatggtagatgtaattacatatagtttagtggtagaattatagcatgatttattagttgggatgccagagcaattgccaataatcctggttagggagaaaaaaaaagctaatgcaagttttctatattgcaatagctgatttaaatgggaaaatatttctatgactgccttattgggctagctataccgataacttcgttgctaatgtaccattgctaccttggtagaacaccactgcaaaggcctggttattcaacatatggttttcttctccctgcgtgaatatttctcgcctgttgacactttgctttactgacttttgataatactacaaatagcaccacttgcctgtattattttaattatcttagctcagctcacacctaaattataaagtgtggtggaaagaactacatatagt

SEQ ID NO: 74108 - DNA, 363 bp, Oryza sativa
agacagacaaatgagactagtatttggattgtagaattctctgaagtgcatgctgatagtgatactaagggtggatatgagagaggaggcaagctcgtatcatcagaggttgttccccatggtcagcctgcgatggtatgtttccactttctgtatatttgttaggcacaattctattgaatttgatcattttattcaatccatttgacacttaattactgctgatttgaaaggccataattaatccaaaattattgtctaatgaacatgtagttgaatcctgatatttacctgatcacctctttataaatatgtctgggttgcttgctatttcctcaaaactattacctgatgacaaatcta

SEQ ID NO: 74109 - DNA, 260 bp, Oryza sativa
gagaggcggggaccccgaaacaatgaccgccgccaccgattggaagcaacccaagacaggcactcaagaccgcaggtgctcacgtgtggcaggatactaccgcgagggcatcgagaactcctccaaaatcgctcgacccaagacacagctgccgaacaaggaacagaaatttgtgaggagcccgcaatgcgagaaggcattccaaactctcaaagaaaagccggcctcctcgccagaggtaatcttgcccgaaactcgca

SEQ ID NO: 74110 - DNA, 402 bp, Oryza sativa
  unsure (1)..(402): unsure at all n locations
tgctttgtttctgngcaacaatagggttgaaggggtacttcctgtttcaatctcaaacctttcagtttatcttgaatacctctatcttgattntaatgcaatatctggaagcttgcctgaagagattggtaacctcgttaggttagaagctcttctactccataacaactctttcacgggaattcttccgtcatcgttgggcaggcttaaaaatctgcaagttttatatatagacaataataaaataagtggatcaatcccattagccatagggaatcttacagaactaaattatttccgcctcgatgtgaatgccttcactggtaggataccaagtgcacttggaaacctgacaaacctagtggaactaggtcttttcaagcaatatttcacaggttctat

SEQ ID NO: 74111 - DNA, 448 bp, Oryza sativa
  unsure (1)..(448): unsure at all n locations
cttgggtttattatccatattcggtacatcactatattattattaataactgaaaatgaagtaagagtactccactggtggagaaaccatctttcgtcggtcggacgatttacacaatagtcccggatgcaataaaaaccggggctaaaaatgatctttaatcccggttcaaaagggtagcgggcatatttgatctttaatcncgcgttgtgctaccaaccgggactaaagatcatctttagtcccggctcgaatgctgtcagggcctgtcaagcccccccgggatctttagtaccggtttgtaacaccaaccgggactaaagatcgtaactttagtcccgggtggtattaggactaaagatcccggagatcattagccgccgttggcgctaccaactgtgactacaagcccacccatatataagtggctcttcctctacagatgtcc

SEQ ID NO: 74112 - DNA, 447 bp, Oryza sativa
  unsure (1)..(447): unsure at all n locations
ctcagcttcgaatcatgactgacaatacttttccattttctattctgatgcggacttatagtaattagtaactgcatttaccgtgtacttcgatagtactcaatttttcaatttactgagagtcaccatttattcgattatttgtttagactcatgttgtgtttctttgtaggattgttcaaacatgtcatttctgagttttctttttgtacctcgcgtggtatagtttatacagtacctcccatgggcctcagaaaggcttattanttntgcttccttagaagtatctgatagcaaaatccctttttcttaaaatctttagaacttgaagataatgaccccctctgtttttgttcaggcaaagtgttataaatgatatctggagcacgatggaatatgacaaaattcttgggatgctgaatgtattggagtttcttctaaattttt

SEQ ID NO: 74113 - DNA, 344 bp, Oryza sativa
agcttgtattttctagttgtctacaccatgatatcatgctatgacattggtatcagttctacgattcgtgcgcgcactatttttctagttaacccggtagaataacatacttcatatagcaaggaaaagggagatcaggaatttctcatttgatggcatatcaagaacagccagtcagttatctggccagcacccatcttgggataagtaaaccaagtacttaagtgtggatcaatatagctagggctggacgaaaaacccgtggctcgttagcttgcgcttggctcaagctcgttggatttgttaacaagccaagccaatcttttagctcattagctataaca

SEQ ID NO: 74114 - DNA, 476 bp, Oryza sativa
  unsure (1)..(476): unsure at all n locations
tgtgcaatggtattttgggatgttgctcttgtcgatggcatttctatgattaaggtgcttattgatggcatttcatggattntctctcttttatattgagatgcccaaccaagtaattttacaaggattttattttcttgaatgtacattaaacgtgccaaaaagaaaaaaaaacttcatgtcataaaacgtcgtaggagatacgagcagacaagcacaatcataacattaaccaacttcaactcgcgtagaagtatatgagtagacattgaccactatcttcaatcctttaacaattttgcaagctggcatcaccgagcaagttggtgaatcgcaccccaaaggcactcccgttgattggatccttgtcaacgcgacatataagtctttctaaatcttcattgaaaattccacggatatagtagttgtcacatatgtagaatagcanataattctatgacatttctaacttcata

SEQ ID NO: 74115 - DNA, 470 bp, Oryza sativa
ggagggtcggcacatcataacggaagtggaagaagatggactttctattgccccggcagaagccgccaagaactatgtacgtcacagcggttgggttgtgcgggataacgtgcctatcagtacggtgtactggcaaagaacaagggcacgcggagatcatgagagctttgtcccagattcggagaaagagatgctgtggaccacaatgctcgagacattcacccttcccgcgggtacagaggacaaagtgaaaaggtggactctgaagaaaatggcagaacagtttcagagcttcaagggagagctgtacaagagatatatcctgaaggggcagacactgaacttcgacacattcccaaagctaagggatcactgagacgagttcgttgcatataagacaggtgaacaagggcaggcgatgatggaaagaaacaaagaaaatgccgccaagaagaagtaccatcaccact

SEQ ID NO: 74116 - DNA, 481 bp, Oryza sativa
  unsure (1)..(481): unsure at all n locations
agctcgacccgcgatcttaagtcacctgaggcatgcaagctcatttttggatagtgccaggaaaaggttctaaattagcatcaagcagccatgcatagatgaattaatagcaccatgcatcacaaaattgttgaggtgctgctgcctttgtggaattgatgatgcaattacagcagtactagaaccaaataacagatgttcggcgtgaatctgagagcacttggctgtacaggcggtaaataggaatagntgttaacagtagataaatgataattcacacaatagctgaagcctatgaagttgtgtttatatgataacaataacaaaataaagttattagctgatattgagtaagcaaaatcattggagagtgtgaggcacactaatattaaaaacacgtggtcataagtttgcatttttcttatcaccacctatccaactcactggtcatctntgatgacaaacatgcaatgctcatgcc

SEQ ID NO: 74117 - DNA, 474 bp, Oryza sativa
ttaaacttttggatccaccaaatgaagggctagttttaactctttatgagaatttctatcatatttattatacttttatctatcaactgtaaatcacctgcagtcaaattttattgtacacaagcaaatagacataatgtgcgttgatgccccttattgcttttacaggctgttgaaaactggttagctgacagggcagtattgccacttgagaattcattgtgtggtagcatacataggaactttgaccttttacttcgtcatagattgcacattgttggagaggtccgtcttgctgttcgtcattgcctgttagccaatcccggtgtcaagattgaaaacttgaaaagtgcaatgagccatccccaggtcaaactcttgcacaagatggcctaaatattctctattttttggtgtactaaacatgcagacatattattttaattctcatgctcttgcacaatgtgagcacac

SEQ ID NO: 74118 - DNA, 401 bp, Oryza sativa
  unsure (1)..(401): unsure at all n locations
ctacaaatcagaaaattaggcgttgctttattactcgtagaagaattgttcactactagtttagcacatgtttgagactactaaaatcatganacatggttgaatcatggattgaaacactttcttctaatacatgaaacatcaagcttccactgctgaaacgtcaacaaatccacaataatcaaagagaaaaatggaaataccattaaaacatcacgatacattggctgaaacacaaaananatatcacaaaatataccaattagatctagcttcttcctcccctccaatggcgtgctctagactatgtgacaatgagtgngcagcggcaaggggtagtaggctgaatcagagatatccaatacttcaacaacctaagggttgtggagcccgatgaactc

SEQ ID NO: 74119 - DNA, 475 bp, Oryza sativa
  unsure (1)..(475): unsure at all n locations
tgaganaccaacaacagttgcattatcctcatgtgcacagtctgtctcattgttattgcccatatggctctcctccttttgtttatttccatcagcagttggctcatcttcttgaaaacattgtccagatttgagatgtccatcaaatgaagaaatggttccttcacataattntgcactttcaccatccagcaactgtggatccttatcatgctcactatgaatctctgcaatgtcattgtctgcaaccatggcatgctcattcccatgaatacagttgatcttgctgtcattttccaagagaccatgctccttttcttcagtttcatcagctgttagttcattctgttgaaaactctgaccagatttctgatgcccatcatcatatgatgagatgtgtccttcacatggatgtccactttcagcaaccagggaagttggaaccttgccatgctcattaccaaaatctctctct

SEQ ID NO: 74120 - DNA, 113 bp, Oryza sativa
  unsure (1)..(113): unsure at all n locations
agcttgtatntagggtcacgtctgccgccacgtcgggcgatgctgacatacgtgatggctctagctcaacgactactcttgtgactaagatcatgagagcccattatcttgat

SEQ ID NO: 74121 - DNA, 349 bp, Oryza sativa
tgagggtcgtgacactctggcgggacctgctgagaaaggacttcctagagctcacgcgatacccaccttcaactatgttcgccacatcacgtgtgtagtgcggaactactctcctatcaggacagcgtactggcttataacactggcacgcagtgatcatgacagcttgatccgcatctgtgaaagagatgatgaggcgccaccgcatcttacatttcacctgtactgtggttcatacgacgatgttatgatgccgacgtctgttataatcgctgaacaatatccaagcttcagaggagcgccgatcttaatatatcatactacctgggggacacagaacgtcttgact

SEQ ID NO: 74122 - DNA, 472 bp, Oryza sativa
  unsure (1)..(472): unsure at all n locations
taagcgtgtagaccattcattgactggaatctggaattatttttagcctaactgcattgnttcatctccattttacaaggagggaacaaacatcaggtctcagtttgtttcagttcttcgcaaatgccaagttctatttaatgaaatgaaccactttgtgaccaacttccagtactacacttatgttgaggtcctggaagtttcctgngctcgtttctcagaagaaatggattcagcaaaggatttagatgatcttctgttggcacatgataagtatctcacatcgattgtggagaagtctctccttggtgagagatcacatggaattctgaggaatctttttgcactttttgacatcatattgcaattccggagccatgctgatcggtggtttgagcggatatatgagttgcaactgaggttagattgctgcataattaaccaatgccatctctctccatcttattacata

SEQ ID NO: 74123 - DNA, 379 bp, Oryza sativa
atacttagttgcgtacatacaagtcgttttggtgaaactaaccaacgggtgaagattcttgctattctaacccccgccgagttaagccgttcttactccattgtgcagaatgaggaggcgattgtctcgtctgttcaagggatccggctcttcatcaagtcatcaagacgagtctagtgctcgttcatcagcccgatgtttgatggaggatgccaacgctccgcgatgtatcctgaacgacgccgacctcgaccttgtcgacgatcgggaaaggcaagcctactacatgctgagtgatgaggacacaactagctcggatataccatgactaccttatgtttaatcaaccaagggctatgtctacatagattacatgtat

SEQ ID NO: 74124 - DNA, 460 bp, Oryza sativa
tgaaccgggtggatttagttggttgcacttgagaaatgatttatttccagaattgagaaagtctaagttgatgcctcgtactgatggtccttttaaaattgttgagaagatcaatgataatacatataaacttgagttgcctcccgagtttggggttagtcccacgtttaacatttcagatttgaagccatacttgggagaagatgatgagcttgagttgaggacgacttcaattcaagagggggaggatgatgcggacatcactacctcggatacacacaacaatcctccaacggtcattcaaggaccgataacaagagctcgtgcgcgacaattgaatttagaggtgagctcgttcctatgttcttctttgtatgaattcaagaatagattactacctaatgattatattgtgattaggaacaatggaggtgataaggagacacttggagaaggactt

SEQ ID NO: 74125 - DNA, 278 bp, Oryza sativa
tagtctaccctgctgaacattcattttaagatccaatcatcatgcattcaagttaactaataataaatgaatgtctagaacaatatggcttgagtcataacaaagatttgttgacagggactttctaaagggaataaaagactttaaacaacaatagacatgcatcaatgacatgttgaacacagctatgcgggggctggccacacaattagctcatgctggatgctgagtgacctgaccacccactcatactggtctccagacccagagcggccaat

SEQ ID NO: 74126 - DNA, 464 bp, Oryza sativa
tctacgaccctagcaatgcactaggttgattgcagatttttattggcataattctaaattttcacttcaacgtccatgttacgtacaatcctgtggtcttaggggcattctcgtctattgaagaatttctctctttaattggactgaaagtgtcttgtagcaaattactaaatttttaggtgtcgtttagtcatgtaattaacaatctttgatgtcctgtaacaatatgattcttaacattatgtaagtcaccactaaaagcaattaatcacaaggtgaagtttatctggttttgaaggtttagagtgaaaaataattagtttgtgttcagaatgaaaatggacttggatgaaagtttggggtccaaaattggactacccttatttaaaaaacaagtacacgacctcagcaaattaagtactacgttctatatatctaatgaagagttagcaaccaacttattc

SEQ ID NO: 74127 - DNA, 433 bp, Oryza sativa
  unsure (1)..(433): unsure at all n locations
tcgctcgagcctcgagctntctcgagcctaactcgtgtgccctcaaataaccaatacagatgaaaggaggctgcatgcatgcttgtcgagtactactagtactagtagctttttcaaacatgatataacaactagtagtattattaaatagagctgcatgcatgctagtagtactaataggctagtgctgcagagtaaagtagtactagtaggctagtgcctgcacggtgcagccctacacgctctgtgtttctatacagcttttcattgggagtaagagtagtactagctgttgcattgaaaatntaagaacttgtcagagggaaatctgggctcgacgagctattcgagcttggctcgtcaagctcgcaagcttggagctaggcttgagttcggctcgaaattgtgacgaatcgagctcgagccgagtcta

SEQ ID NO: 74128 - DNA, 398 bp, Oryza sativa
tcaactgcaatgtacatttacaactagggggagtggagagaagggaccggggaaataatatgggacgttgtctccaaaggttaaaccgagcgtgccgtggcaagctgcaagttgtcataactgaagggaatataaggccagtggttcctcttgttgctgcaaagtttgcaactgaatgcaacatcatagttaggaaccatgtgcctatactcccgcattggaagctatacaaggaaaaacctgcatctgcgtacgttaatctgttcttaggaaaactaaaggtacatgcattctctggtcctttccacatttagtctcaatagaagatccattgtttgttattttaagccataaattactgaattgatattcttttctataaatgttcttccattcga

SEQ ID NO: 74129 - DNA, 296 bp, Oryza sativa
  unsure (1)..(296): unsure at all n locations
catataactgcataataaaagaagtcatgaatgaacggcgaaaccgaacggttgaacactaactgttgcctttntttttttcgatcaaaggtgatcacttctgcagagttccacccgtcgtcgtgcagccttctcgccttcggcagctcgaggggcttcgtcccgctggtcgacctgcggcagtcggcgctgtgcgaccgcaacgtcagaatgtaagaggctggctaattaattagctgatgttgtacctttctttttttttctctgaaaaatgcaaaatggttcgttactgtttt

SEQ ID NO: 74130 - DNA, 471 bp, Oryza sativa
  unsure (1)..(471): unsure at all n locations
tgaaagcgcgcacacaaacacacagcanattgtatgtctggcctataagcagttagatacaacaaagatccaatcatacttctatattccttntgatcaacagcttcaccatcttcatcaggatccaacacagctgtagaaccaattggtgttgaaattggcttgcaattctccatcttgaaccgtcgcaaaagatccttcgtatacttcgtttgatgcacaaaagtaccttgaggtgtttgcttaatttgcaatcccaaaaagtacgataactcacccatcatgctcatctcaaattccctgcgcatagtctcagcaaaatctacaaccaaggcgtgagtcgaacaaacaaagataatatcatccacataaatctgaacgaaaagttgattatcaccatgcttaagaacaaaaagcgttttgtcaacctttcccattgtaaaacctttcgcaagcaaaagttcttaagcc

SEQ ID NO: 74131 - DNA, 414 bp, Oryza sativa
atatggacacaatcgtcgcccattgtgaagcctagcatgcgctaagagatgcaatacctgaaacgggaagcaacgctacaggactacgcatttaggatcttcagcatcaatgaagctgatcatgaagattatggtcggcatgttgcatctgatccctctgtagcaaccaccataaccactctgtctggaggaagatgacggttgctgcaacatgaatattgtatatgatcatatactactctacatcattgtgtctactgtgatacaatgttgaagaattactaataaatgatagtccgtgctcctgtttcttgtgaaatacaccaaagagctgacaaattgggttcgctagcacattacgatgcaagtgtagactgtgttcacaaaccagaaggagaaatctatatcgtgatg

SEQ ID NO: 74132 - DNA, 429 bp, Oryza sativa
  unsure (1)..(429): unsure at all n locations
tcacacaccaagacagncctacaacttgaaatgtatatctctataagatgcattccataacagtccgaacaatttaacaaggtttgctgtttaccataattctctatacaacttcaacatggttcgcaaaacataatagtccgtaacaacaataatagacatacgaggtcaacccgagctattaaatcgtcgagtgacgatctcctcctgcaagctcttgtaatattgttgttgtagcccagacatggcactaatatccatagtcataatcctctcttcttctaacattcttttcaaatctatctccttggtcttcaattctaattctttgctcctcatctcaagattttttgtctcgcttgcaaccttcgcttgttctagtgcaaccttctcttgctctagggcatgtgattgtatatatctctcatc

SEQ ID NO: 74133 - DNA, 409 bp, Oryza sativa
ccctgccttcagcttgcaactccccgcgctcctaaggcggagccctcatctcatactggagctagctcaagctcaatacctcctcctcctcctgggtatgatccaaatattttcttccattcacagtacgcttattttggaatgcaacccaacgaatacttcaacctcgtacttggtgctattaataccctaagtgaaaacatccagcgcttgtctaccgggcatgaagctctgcatgacgatgttccgtggctcgcgcaccgatgttggagacttgaatgcttccgtggtgagatagacacattgcacgcccgacaattcactagtaatttcccgacttatttgggcataaatcatcgtccaggaatcagccgatgacacaagctgacgattaatatacaattcatct

SEQ ID NO: 74134 - DNA, 476 bp, Oryza sativa
  unsure (1)..(476): unsure at all n locations
tctcanagctagcttcatcagagaggttctccatccagagtgttttctcacccagtcatggtgcgcaaggccaacgggaagtggaggttgtgtgtcgacttcaccgacctcaacaaggcgtgtcccaaggatcacttccctcttcctcgaatagaccaattggtgaattcaacagctggttgtgagttgttaagctttcttgacgcctattccggctaccaccagatcagcatggcgaaagaggacgaggagaagacatcattcatcacgccgttcggtgtattctgttacgttaagatgccgtttggactgataaccgcaggaaatactttcaaacgcacggtccaaggggcacttagcgatcagcttgggaacaatgtcgaggcatacgtcgatgacattgttgtcaagaccaagacaagcgactcattgattgatgatctccgggaaatgttcgacaacctccgacgatatcg

SEQ ID NO: 74135 - DNA, 290 bp, Oryza sativa
taccagtttgtgctgacacccaattcttccgaagatactgcatatgcccgtgtgaagcctagtagtagcacaaaatgttttctgcttttctccatctgtcaactttgtagccggctattgggatggtttattttgtctagctcccctttcaacggcaaactatattgggcatacaccatctttaagggttttgtttgtgtgtatttatgcacttaaatactatgccaataatgcgtacatttcccacgggtattataaatggaatgcttatgtattcaatgaaattaaga

SEQ ID NO: 74136 - DNA, 471 bp, Oryza sativa
  unsure (1)..(471): unsure at all n locations
nggcatatttgggtttaatatgtttccaatccacactacatgtcttcactaggcaaaatcctttgttttgatacgatacgagcaaagaagggaatcaatcacttacagcttcgatgtcgattctgtagacgagcaggcggcgtcgctcgcggcagctggcgcggtaagccatggcgatgtgcgcggcggcgagcgcgagcgacatgaggaacatggcctccacggcgacgagctggcccttgccctgcagccccagcccggccctgtcgggcaccaggtggagcggtggtcatgggagagcatcccctcgccatcgccgccgccgttcgccgccggccgcgaccccatgttcgtcactgcctacgccgtgcacccggacgggcgcggcagcgacttcctcgactccctcctcgagctcatggctgccggcaagatggaggagcgggtcaacgtggtgaacatgccggagag

SEQ ID NO: 74137 - DNA, 469 bp, Oryza sativa
  unsure (1)..(469): unsure at all n locations
tattcgtgcctttcattttgcatgcctaaattgatttccatctttctgtgtcctctgctcacattntctattgatcatggtgatgatgagggccctaaatagttctgataggtttaacatagatgatatattattcttattaagttacagaaaaatgtaaggttcagacgttcagtttaagccttgcattgtgctctgctgtgctacactgtgggaccatgaagatttgctaagcaatacatttgacatggttttccaaaggccacaaaatgtcgaattagctttgaatggattcaaagattaatcgcaataatgactccatacatgagaaaaaacagacaaaaaacctataccaacagagttaccacttaccattttaagaattgtcaaattcataccatattatatttacactatcgcacttgattattctgagaacctacagaagaataaagaaacataaatagag

SEQ ID NO: 74138 - DNA, 359 bp, Oryza sativa
atgacttcatgaacctgcatgaacatacgaattataaggaagaagtagttccgtagcatatatgaaaatggaaacacttcttttggaatgcggagcaaccaacatagcgagtctttaaactcaatgctgcataggcatcttgatcgaaagatgtcgctagtccatttggttgagaactatgaattttgcttatcacgtatccgtaggaatgaagccaagctggatgcgagagcctcacagtctgtccattcactagtctacaatatgtgcgtacccattagagaagagtgtggtacacatttacacaccgaccatgtcaagaaagttgggctgagataaggaactatatagtgggaaat

SEQ ID NO: 74139 - DNA, 460 bp, Oryza sativa
  unsure (1)..(460): unsure at all n locations
aacacccaaanncctgtgacgggctgagnactattgtactcaccctcgctctatataaatatatatagttcctccacccggaagttgaagatgaagtaaagcgaagattacggtttcgtcctggttcccagccgtcgcctgtggagtggggtgttagaccgttggttccgctgctgctgctgttgctggagattcctcgactgtgtctttggttggattctcaggctgacctgagctgcaacctaagttaaggtaaataagtcctctatttattctaaggatttgcaatgaatcatatctgtcaccgtgggtaccagcactatgtcctgggactggtactgtgatcgcggtttcgtaggaagcggttcgcgccgnttttcctacgacacgccagtgtcaggtgtcgttgtacggcggtgctggaatggggtgtgacatacatctaagagtatcggggaga

SEQ ID NO: 74140 - DNA, 462 bp, Oryza sativa
tcactattccatcgacctccacagcacgctgtgcacagttttttctcgggctctgtgggatcctagccgctccgccgccacccacggttgtcggagtaacacttccaccctactaaacctgcacccacctcctattccctctagtcgatatgctgcctgctgacaccgactacagaagacaccaaatctagtcattatgctctagcatcgactagcatacaaccaaactctagctgacaccttgttagttgaattccaaccgtcatctaagtcccacacccaccagtatcgcctatccaccatactctcagccacctactcttcacccaccagaacctatacataaaatatagaacctagccgatatattgtcttacaccacaattaactcccatataaccaaaccctagatatgatactacctaaacctaccgccaccaaatcatagctagctacataccc

SEQ ID NO: 74141 - DNA, 354 bp, Oryza sativa
actagtatctactcaataatgtatgttgtcccctccaccaacaaaagagaacaaatggaaattaaaatcttattaatcattgttactactccttgtctgctgctgtgcactgcagacagtacagctcatggcagacactgcattgttctcatttagctagcaaagcttctgatttatatgtgctaatcagccatctgaaaattgcagtccactagtgcaaccaaacagtccaaaactattcacataatccacaagggggaagaaagaagagaagaaagaacaacacgacgattaataacatctgataattgcagtccactactgcaatcaaacagtccaaaacttatcacataa

SEQ ID NO: 74142 - DNA, 476 bp, Oryza sativa
  unsure (1)..(476): unsure at all n locations
actcagcttagtccattttatgccccaataggtatctcttattctcttatctnataaacctttgaattttagagcttaaaataaagatgattctgaagggctgtttttatggtagtttagttttcaacattgactttgaaattgctaacgacatgtatctatatataaaagtttaacaacaaattattttatggtcattgataagccattacaacttataatcatcgtattgcagtatatattttatatgactctgacttctaagttttggaaaaatatattgtataagctaagatgaaatagtttaattatctaaatttagtacaactattgaccttaataaaaaaaaattgtctcatcctaagagtcaaatttcactgttctattgtgtttattcatctgaattttgaaacagattatctgttctacacttaaagaagatatgtcttctcanaaaactttcttctactacatta

SEQ ID NO: 74143 - DNA, 404 bp, Oryza sativa
  unsure (1)..(404): unsure at all n locations
agctttttctgattttcttgttccncacctctctaaagctctgaatatattcatgcacgggctcatcataccgctgtttgattgctggtaagtcggacaactatatctcgtgaaccccgctgtcgaaataactatggaagaggaacaccttcataccactctggataaggctgccgatacaagcttccagtctctttaagttagagcccgaattgtttcctcattacatcggcaatcacatcggtccattgtcgctgctgagctgccccttgtggttgctgctgcatggatacaaactgaccaaactggtgagcgaactgctgctgagccgatccctctggctgatattgggcttgtatagctgaatgctggtatcgataacttaagttaccctcttggtagtc

SEQ ID NO: 74144 - DNA, 415 bp, Oryza sativa
  unsure (1)..(415): unsure at all n locations
accagagcaagcaatctttgttaatctcataaggacagagaattggctccttaacctattgtatataaacagctatgtcaatgggaagctgatgaccaacatgatggttgatggtggggctgctgtgaattcgatgccatatgttacattcaggaagctgggcagaaatactgaagatctcatcaagacaaacatggttctcaaagaatttggtggcaatccatcgggaaaaaaaggagttttgaatgtggagctgacagtcagcggcaagaccgtccctacaacattntttgtcatcgatgggaagggttcctatagtttgttgcttggaagggattggattcatgccaattgttgtattccttcgaccatgcatcaatgcttgattcaatggcaaagcgacaagattgaaatt

SEQ ID NO: 74145 - DNA, 438 bp, Oryza sativa
  unsure (1)..(438): unsure at all n locations
caagcttgtttttattttagaagaggaaattggccaaagatgatgtccgggaattaatttaccgagaggtgccactgatgaattcttttgtgaatattacgacagagctgccacttgactctntactgtactaatatacttgttaaatctctttagattttagagtatcatccccatatgctgcaagaatatttgcgcggnggagaccagatgagtttcatgtatcctaggtaactccagtatttcttttacgaagttgatcacctgttggcatantttatggtaactaattcactggtctgtattgttgcattccacaaacataaatcaatatgctgtattaaattagtgacttatgctaaataatcacacaaaanaaattgctacacgttaggtcaaggacatatttcagtggtaattctgatgtctggttatata

SEQ ID NO: 74146 - DNA, 471 bp, Oryza sativa
tcatgtagactgctattctgagtgctagttgtgctcatgactttatggtatgatgctgactaacgtgcatgttagaagttttctttggcaatggttgattatcaagaagatagaagtattacaacttcttgccgggtgtattacaacttctcatctctcttgcacctgtgagtgacctatttatcttagttcttttcgtctacataagatcaatcttgaattcctttttttttccactgagtatgtgcagaatctctcaaagactctaacgatgtcggtgcactatttttgagtagaatgctgaggacattaatcctaccacaaaatgctcaagatgaggacctttccctatattgtgcaggtacctgctgtctttcgattttatgcaatgccctcagttgctttgacatttcattgagttagaatattttagattgatatgctaaacttgaaagattcgaaattgcaatg

SEQ ID NO: 74147 - DNA, 455 bp, Oryza sativa
  unsure (1)..(455): unsure at all n locations
tatcttgctttacttaaaanagatgatcactagtagctcatcacacactctagctaagctttaggtcacaccaagcccatgatggaagtccactatgacagctcacccacgggtgtgagagtgagagtgagggagaaatgtgccttgctttggttgatctgatcgaggaagggaactatagtagatcagctcaacacagggattaccaggactaaagaaatgggatttcagaatgggttaggctaaaagtggggtagatgcaaagaatgttctagctgtccaactctcccttctcctccaccggccatgttctctagttagcttcaaataaaagtaacagcaatggtttttacaatctatagctcaattgcttgctatggcaaagacctcacaatatttgtatattctagcttcattgacttgtgacacgagtcttggatattgtaactcaatgg

SEQ ID NO: 74148 - DNA, 455 bp, Oryza sativa
  unsure (1)..(455): unsure at all n locations
tcagtatgctgcctccactgcctgcacgcacgggcttcattataatgtgttttntntttttgactaattcagataagggtttcgtcgctgtcatggattatatcagatatagtcctccaaagagaaaaaaaagatatgaaagtgaagtgtctttttgttccactttgtaagtggagaaaaaaaaaagcatcaaatatgctagcttcttttagaccttacaatttgtgggcaagataagtagtgtatgatagtatttgttagcaccctgaactatagttgatgtcaatatatgctgatgcgatttttttaaaaagaaaaatgttgatgagttcaaacacaccagaaaaataatttgggcacctaagtcagtcctaggatttgtggctatttaccaaccttgttttatctgctttagaatttcagtttaatttgttttggcaagaatgtcttactat

SEQ ID NO: 74149 - DNA, 426 bp, Oryza sativa
  unsure (1)..(426): unsure at all n locations
agctngttggtgaggtggaccatttcaaggacttaccgctttgttagaatcagggatctggaatactggaatatgaaggttgacaaggatgcaaggaagaagatggcgcaaggagagcataaagagccgcttccctctagccgtggcatcggtggaagcgcagctcggnttcttttcgttatccttttacttcctctagctgctcggtttctggagtttactctagttaaaggcggtacttttgtttgttagttggtaaccccaacatatgtgtgagtgtcgggtagattgtaatggacaactgttatgctttgttagtaaaagtagacggaagcctttcatctaataaaactagctagtatgcgaaatttgcgttgtgcctgctgtatctttcctactgtaatgtaacctttgttgatcgtttcc

SEQ ID NO: 74150 - DNA, 437 bp, Oryza sativa
  unsure (1)..(437): unsure at all n locations
ngagggtcggcacatcataacggaagtgcaagattatggtctttctagtgccccggccgaagccgccaagaactatgtacgtcacagcggttgggttgtgcgggataacgtgcctgtcagtacggtgtactggcgaagaacaagggcacgcggagatcatgagagctttgtcccagattcggagaaagagatgctgtggaccacaatgctcgagacattcacccttcctgcgggtacagaggacaaagtgaaaaggtggactctgaagaaaatggcagaacagtttcagagcttcaagggagatctgtaccagaagtatatactgaaggggcagacaccgaacttcgacacattcccaaagctaagggatcactgngacgagttcgttgcatataagacaggtgaacaagggcaggcgatgatgganagaaacaaag

SEQ ID NO: 74151 - DNA, 446 bp, Oryza sativa
agcttgttctttttatttgatgctctattgtactatattgtatactagaataggaagagagaagagtaggagtcggaagaattctggagttgtcggcgatcttctcctatttcttttattctgtttattactctgaattcaatataatattcttcttgagtaatttggatttatcttgtgagaattatatcttggttagttcgtaaatagcatacgggattattgttcactataatcaactaaaatatagtgattgctttggtgagttataaacactaaagtagatattaattgcttagacgtggtgtttaggtaattattatccagtaattgctgcgtatcccacagtacgttgaggtatgtgtagaggtggtgacagcccaaacaaacttttgaactaccgccgaagtaatcgcgccgagtggatcggcttcaatcccacgaga

SEQ ID NO: 74152 - DNA, 477 bp, Oryza sativa
ttgcaactattaaacatgtgtcagcgctagcctggataagattttttgctgcgccgttgacatgcgcactccacatgtcaacctaagggaccaccgtagaccgagtacacagagacggtccacgggtcgacggaagtggaccccgtgtgtcaaccgatgcgagtggccgacaaacgaactccactagacaccacgcgagctgcacacgtggaaaccacgcggctaccgagcgggcacactaacacggtcaccacactcacaagcgaacgactaccgacaccggtacacgggtaccggggtcgacaaccgcacaacgggtacggggcgacaccgaaagaacgaggacggtgcagcgagaggagagatccttaccaccacgcgacgaggcgtgggaacgacaacgacgaacgggcgcggcggagacagacgggcacaacggagacgaacggcgaggggacggcttctgcggcgatcctt

SEQ ID NO: 74153 - DNA, 434 bp, Oryza sativa
  unsure (1)..(434): unsure at all n locations
agcttattttcttatttcttgcaatctagatgtgctccgagaatatccacagtttgtctggtttataagcatcttacgcgcgtttagtttccaaaacaaattatcacgcggtcgcattgaatgtttagacatatgtatggagtatttaatgtatgagaaaaaaaccaattacacaaattacgtgtaaattgcgagatgaatcttttaagcctaattgtctatgatttgacaatatggngctacagtaaacatttgctaatgacggattaattatgtttaataaatctgtcttgtagtttcctggtgaaatatgtaatttattctgttattagactacgtttaatacttcaaatgtgtgttcgaatatccgatgtgacaacccaattctaaattatttggccactaaactaggccttaatttctattactcgcaa

SEQ ID NO: 74154 - DNA, 461 bp, Oryza sativa
  unsure (1)..(461): unsure at all n locations
aacctaacattangacagcttcccaatgatagactggttctttgttantcagtcagcaacaccaagaggagcacatgcaagcactcatgggaggcacttatcttgagtttcacaagaaaatgttacaataccaactgttgtaatatgctggttggcagatgagacaatgaaccacaatgcaaaggaaaagacagccgactaatagcaaaaaaggacttactatctcaganagcatatatgtaagtgacatgataatgaagcaaatacatgtagataagatagttatacaaaggttaatgtagcaaatacatgtagataagatagttatacaaaggttaatgtagcaaatacatgtagataagatagttatacaaaggttaagtgggagggaccactaatatgtagtggtctcaccattttgttgcaccaattacctgtagtgtatctgtgcatgcgatgta

SEQ ID NO: 74155 - DNA, 354 bp, Oryza sativa
catgcaagcgtgtagatatactctctagtgaaagacaactctggttacgggatatggtctacctaaagatgcaaccgtatcgacagaatgctcttgggctgagaggatcattgatacacatagcaaaggtttatggacccttccgagtgttggaaaagattgtgaaggttgcttataaattgcagttgccacaataagctaacatacaccctgtgttgcacgtttgtcagctgtagaaacatgtgggaaggcaagccatcccgctaccaaatctttcactgatggtgctgatggtactgtctagaccgaaccacctgcagtattagcaatgagagtaattccaagacaatatga

SEQ ID NO: 74156 - DNA, 465 bp, Oryza sativa
  unsure (1)..(465): unsure at all n locations
ctaagcttgcctctcttggtattgatggtccagagtttcaccacttgtttctcttgtatgcccttnttcctggagctgcaggctgcataattctttgcttgattgtaagtatattttccctcccagcttccttaaagtaaatgagattatcataaagagaaatatagcattaaccctcatactgtacttgtttcagcaagaggcggtgatttacctgaagaagaatatcaagttttgaatcaagcggtgcattacttctcgtagcaatgacatgactaaaattcaagattgtaccacaatttgctacaactgcattgaggagaaatggacgaaatgcagatttattttccttggtcttatttactaaacaggaagatgagacaaagcagattgatcgatacctgattgtgaatatgtgatcacagtgcagaacatgctaatatgaagtgcataccaatatctcat

SEQ ID NO: 74157 - DNA, 461 bp, Oryza sativa
  unsure (1)..(461): unsure at all n locations
agcttcatcattatgatcttataataanatataacggagagagtacgcattatactatttcagatctttntaactagcagcatagacttcaactcagaaatcagaatacatacaagagaattcaactgggaagcagcttccaattttccgttcaagggtatcttctcgtcgtcaactctagctgaactctcccaatatggaaacattcagcaaacagaattgctgaattggcccatggtttcacgagcacaaaatttccttctttttgtccctgaaattgcgcagagaataaaaaaattaagcaaagacattgagaagaagatgctaaacacagatactgagcacatagcacgaccttacacaggaatcatgggatcaaccttgccattgtatttgtagaaccccagatacagagcttataacatcccagagaatgtacagtctacatgaatacatctaat

SEQ ID NO: 74158 - DNA, 472 bp, Oryza sativa
  unsure (1)..(472): unsure at all n locations
tctttagttctttccctggcagttttgttattcgaggaactcttttcctgcagttatggataaacatacagagaccatgtctctttagccccnttgttttctcataatttattcagaactcctccactctttacggcaaaagggggaagggtgcttcttcctgcaaaatctcgatcgcaaatccacaaaactgttcaaacagaattagtagcccatcctttgacattataaaccgtaacacttattagcagtagaaaaagttttacgcaaaacttttttatatatgctctaagtgacatgctaaaaaataaactacaataataatattgaaaccaaatccaaaattaaattttaaaatttaaattttagttacattttctatgcaaaaataaatctaagcctaaagcaaagtgaggggttttttatagtggaacctgcttattacccacattcaacttgtaaaaatgacatg

SEQ ID NO: 74159 - DNA, 426 bp, Oryza sativa
gagcttatctactttgttatgttcatcttccccatatgtggtgtgacattcactatggcattcgccatcttcatgagaagcccatacatattcttctgcatcgtagaaggtgctatctgtgtcaaagtgccttccgaattcgtcttcttccgcttgatagtcattctcaggataggtgtctacctgtgagtctgtttgaagtatctgttcttcaaataagttgccatcataatatttccaatgtccattggtttgttacaggatttgcactgtgctagatgttcacgagattctaattgtgctagcagagaccatagatgtgttgatgcctcaattccagtcatttgaccgatgatcattaagaaccaacacaaagtgtagtcacatgagcaatgcacacctccgcttttgactgcagttgagaaa

SEQ ID NO: 74160 - DNA, 461 bp, Oryza sativa
  unsure (1)..(461): unsure at all n locations
ctcagcttcgctacagccggttctttgcagttggctggttccgtttgctttatcttgcaaatgcaacagagccaaccatactagacaagggtgttattgccattaataattttgtttctgactatcatacttatttttgcttcacttccaaattatatcttctaataacgcttatgtgtgtttctcaagttatattttagagagcatgtttccaatacattttagttttcgcagaaagaaaggatttatctcaaatcaattaaagggttggcttgtgtctgctgtctaatatcttgcaaccacagctggttaagtgtctatgcggtgttctttntaacctactacttcgctgatatgctagattactagtaaaggactaagtctgactctattccatcctacagcgtacgggccctgttggcacagttctaactccagttccgcctcttctggaggtggag

SEQ ID NO: 74161 - DNA, 400 bp, Oryza sativa
tttatgtacctaatctgctctaaataatgatccattggctattctataaatcctcttaaatacgtctgataaccaaacaaatgatattactgccgatgaggcatatttatgggttgtgcttaatatatatatcaatccattgccgaactggttaactacatcggctgggatcactaacgatatatcatcggcctatcggccgattggctatcagctgactcactctatttattgttttccttgctggttcaagatcaaaccagccggcacgcccttaacacactcgaggctagccttggacctgcactgtgattaagtagatcttccaggccaccgtgtctttcgtcaacaatgacatatgggtcccacatatttttataattctaatgccacagaagag

SEQ ID NO: 74162 - DNA, 459 bp, Oryza sativa
  unsure (1)..(459): unsure at all n locations
actcagctgcttacttcccatcttggaaaacctgcctatttcttctcaatacctttacttatatttctgacaagcgttccctttgggtctcatgaatgagtncaagaattggtccgtgcttgctccatcattgcctcaagaccatctgctgctacgtgtcaacttatccggagtgacgggtacgatgttgtcatcattaatctcagatagaccaagcctcgggaacttcgacttatcagaaccatctttaccagccgaagacggcgatgctggcggtttctcggccatgaggaaaattgctgntgtgattctgacttctgatctgtcccaccgggcgtgccaaaagcgtgttgacgtaaaaacacgaggcctgngagatctgcttaactccagtgcaggtccaaaactcgccttcgggtatgctatcgtgccaagtgatttgatcctgcaatcaacaag

SEQ ID NO: 74163 - DNA, 395 bp, Oryza sativa
  unsure (1)..(395): unsure at all n locations
aattacaaggaggagtgcatgtcatatgcatgcatccctgattcttccctataggtcgattgcatttcggacagggcttagaataagctaatatcctgggggagaaaacaacacttgagaaacagcttccagtttttccttatgaacttatgaaattaaaaagaaaaaaagtattttacacaagagatattcaagatggaaagaataaagtacangacatactatcaaatacaagaatgaaaaggagattatgtgtgcgacaaaccaattcatgtgttcagattctgcgctgttctttagtatccactttgagactgtgtcacagctaactggccgatgagccttctctgacactgcattaccaaagatttactggtatatcaacaatcatctga

SEQ ID NO: 74164 - DNA, 473 bp, Oryza sativa
  unsure (1)..(473): unsure at all n locations
ntagtttctcagacaatatagattcttacctagattttatgtatatgtagctataaaatacagaaaatgaccatctagttgtttatcaaaatcttaaaaatttctctagtagagcctcagcttctcagaatcaagtcgtaaaaaaataaataataattatgtagatttctccggagtcacaatgtgatgtcggatttcttcggccggagctttgccgccgaggaggaagccatagtaccagcacatcgagctcatgacgtacttcgttctcgctggcgcggtgaagtcggcgctacacgggccgtatcgcatgtacaccgtagccggagagcaactcgaactcgtcgagcagcgaccacacaaagtaccccgcgttcgatccgctcctgcacccgtcggtcgccggcgaaccgagaaactaattaagcatactctagctgaagtccaaatgtatggaatatatatcgcaatat

SEQ ID NO: 74165 - DNA, 410 bp, Oryza sativa
ctgaacctggacacagattgattttatttgcatcaatggaagaacacagtgaagttcctagatgaagctctcttactttatggatcaaagttgctaaataagattatcacgacttggtatgtgattcaaaggtcttgcatacgttctattgcattaactccacagggccaggagccactccaataagtttacatgtggcattacgaactcccatactcttggaaaggtgtaaaatgtttaacgttaatatggtttctcacctttggagaaaattttaacacaagaaacactggttcctcagttgtcaaaagagttagaacttcgtaatttctcgctattgcctgccacaagagaaaatttcttcccttaatactataatgaaatgcttaacctgatactatcatattgat

SEQ ID NO: 74166 - DNA, 473 bp, Oryza sativa
tcgcagatccctcatcgacggtggcagtgcactcaatattctcttcgccaagaccctggacgacatgcagatccctcgcaccgagttaaagccgagtaacgcgcccttccatggagtcattccagggttatccgctacgccacttggctagatcactcttccggtcacttttggtactcgggagaacttccgcacagaaaacatttgcttcgaagtcgctgatttcgagacagcgtatcacgccatactcggacgcccggtgttagccaagttcatggccgtccctcactacacctacatgatgatgaagatgcctggtcctcgaggagtcatatccctacggagcgacatcaagcaagccgtcacatgtgacaaggagagttgcgagatggctcaaacccgcgagatcgcgattgctcgagaagacatccgactggctgcaaccacggcaagcgaaagagaagtgcctatgg

SEQ ID NO: 74167 - DNA, 427 bp, Oryza sativa
  unsure (1)..(427): unsure at all n locations
agcttattttgtttttattctgattttataactttcaagaacaataggaagtttaccacccctgccatatgacaaagttagtgtgcaaataaatcatgattaagataaaaaatgagtatattgaagattcactcagaacagcccatagatgatatcgccaaattcagaaatattcagaggaacaagtatgccttatctggtcaaatgtatggtgcaattaatatagaaaacatcattatattcatcacaacttggacacaaataataataccaaaatgattgttgtggttgttntattatggttgattctggaatatantaagaaccatatgatgaaacgagaggaggcatagtaacgatggtgagaaagagaatggganaagggattatgtacctttgtgcaaatcagagatccatggntgtgtgg

SEQ ID NO: 74168 - DNA, 449 bp, Oryza sativa
  unsure (1)..(449): unsure at all n locations
caaatacttaggtgcgttctttcttttcgttttggtgaaactaaccaacgggtgaaatttcttgctattctaacccccgccgagttaatccgttcttactccattgtgcagaatgaggaggcgattgtctcgtctgttcaagggatccggctcttcatcaagtcatcaagacgagtctagtgctcgttcatcagccgatgttttgatggaggatgccaacgctccgcgatgtatcctgaacgacgccgacctcgaccttgtcgacgatcgggaaaggcaagcctactacatgctgagtgatgaggacacaactagctcggatataaccatgactaccttatgtattaatcaaccaaaggtgcatatgttctacattagatttacatgttatatatttgaacaaacgttgctacacaatgagtttcctgtgtntntgtctgcagaggtac

SEQ ID NO: 74169 - DNA, 374 bp, Oryza sativa
  unsure (1)..(374): unsure at all n locations
agcttatttgttctgtatcaagtgaaattattagtctcctaaatactattagtaaacatacaaatctatgtagtaaataagcaaacttggtattattgatagctgataaatcttagtattattagtacctaacgaaactaataaatgtcagtggcaaacaaaactaagtgttattagtaccataataacatatcatcttgtcaagcttgcgtgctattactgtaagtgcttcaagtgcacaagaaaaggcaattaaagtttagcctaatctctgttgccatgtacagaactcagcaatctcaatacagaatactgtntctttgctttccttcaaagaaacaaaccgagaagaaaatttaccgaacagaaccttg

SEQ ID NO: 74170 - DNA, 470 bp, Oryza sativa
  unsure (1)..(470): unsure at all n locations
tccncacccgggtgcggacgctcacggccatccccactgttatcttctccgacgcggcagacgaggcgatcgggtgctcgaggcagagcggcggnggagcggaggcgcctgctcggacaacttcttgaccgtggcgcggcgcgttcactggaagtcagagcggatgggcgttgggttgaagcanggtaggcggtggtgctgctggcttttccaagatttgggagatcatgcatgaacggttttgatgttgattaaggaggtgagatcggattgatcagtcgctacgccacgccacggcgcatgacgctcgcctgcagcgtccgtgtatgcctcctgttggcgccgcgccacgcctcgtccagatcgatctcgtctcacgagccttggtgtaaaggccccgccggtgcctcggccggatactatgtcagcagtgcgcgccggaaagctagccggtggaggagctggaatgg

SEQ ID NO: 74171 - DNA, 438 bp, Oryza sativa
  unsure (1)..(438): unsure at all n locations
tagcttattgttcataattaagcctaaaatcaaagtcccaaattcaaaatcagcttcggattataatccanaggagtgccaagcagagctatgcaaatataacttcagtaagaaaatgtcactgtcaaatagaattaaagaagtggagataaacacaaattctatgagctaacataaaaaatagtactccctgcgtttcagatttataagtcgtcttgactttggtcaaagtcaaactgcttcaagtttgaccaagtttatagaaaaaaatagtgatattttcaacccaacacacatatattatgaaaatatattcaattataaatttaataaaactaatttggtgttggtaatgttatactatatcaatctacaaacttagtcaaacttaaagtagtttgactttgactaaagtcaaaacgacttattatatgaaac

SEQ ID NO: 74172 - DNA, 472 bp, Oryza sativa
  unsure (1)..(472): unsure at all n locations
tatattgcagnttgatgataagaatcaaacaactgataggaaccgtattcatatgttatgtttctgcgtactcaccggtagatgcttgagcaactcctgctgtacatatcatatacaaatgctctaccatcctcacaaccaattataacctctggatcggcataactgtggaaagtggaaacaaatgagcattgngggttaaagctaacaaaatctttatcataaaacgtttggacagcacacgaccctacgcaataatcctgtgcctctgagattacatgctttcatgagcaattcagtaatttcagtagtatatgtaacatctaactnttcatttgttcgaaacaaaaggcatgtcattttacaaacttaaagcatgttcctcacctcatacataagccacggttgaatgaggctccacgagatngaaaaatacttctcggctcactacgtctccatatgncaaagctgg

SEQ ID NO: 74173 - DNA, 308 bp, Oryza sativa
ttacaccaacctaataaagtggagatgcttggtccaactctaagagggaatattccttgcacaaaagccttaccgcgttacaccatgcatctaacgaaatgtttctccaacattttggagaaaatatacatgagttttaatagtggacatctaatctcatcttcatattctttatatgtcgagagcaacaatacagcataaattctgatagaattgtactctccaaactgtcagaatttttatcatctttgttaccgctaagatataataaagctgagggtaagactctacacatactggtatagtat

SEQ ID NO: 74174 - DNA, 465 bp, Oryza sativa
  unsure (1)..(465): unsure at all n locations
gcttcttcccagcatacggctntctagatgtatatgacgatctctatacagatggatcttatatgaatcgtatgatgaagtaccacatgagtggatatataggaaaggaatccaaatctgccgaatcgctcatgttatgatcttctacatcctaggtctccgcgttccgtcatctggcttatgttcttcatgtagcattcagatcgaatgactctatgaaattacgtcgatacttctacatattatgggtaacgtaggagacatccctattttcccccgggggtcttaattaccactgcttagctttcaattcgcctctgaccatcaaattaaatgtgaataacccgtcctcctctctttgaaacaaggggcgcttccggttctgtgcgtgcttcaaacaatattgtcttctccatattaccatatctctagagtcaataattttctatgaggaactactgaact

SEQ ID NO: 74175 - DNA, 408 bp, Oryza sativa
  unsure (1)..(408): unsure at all n locations
agcttgggatttggatccttatccttangattgcttccaggcgggtctgaagtgttttgctgctttcaatacgctatgttggtttgttgtgttgtgaaaagaacgggttaaaagcgttattgttcaagagaggctagattatcaatatcatgcgtaatggacctgagaggggaatatgggagacagcagcaagctgactatggcccatccctgtctgcagccaccccaaggtctgaatcatcctctggcttgcaatgttagctgttcacagccagaggtctcattcattgctgtttgagaattattagcatttgtggaacatcttgtttagatagatcaacaccacgaatgtgattgagttattatggtccacatcatatggatcaaaagcactcaatacttccatta

SEQ ID NO: 74176 - DNA, 479 bp, Oryza sativa
  unsure (1)..(479): unsure at all n locations
tattgggtgatgactatctntgccacaactaccaaaggtgtggtttgtcacacaaagtgtggccaacaaatcgttggccacaagtgtggcaaagttaggcaccaaattgagtgtacgacatgtgaaaagagctaataaagtgtggcatgtcacagttgtaacaaaccaggctctaggctattaaagtgtagcacgcctaaggtttggtatggcaaactctggtcaccaaaccaaacagcccggtttcgcatatgatggattgatggccattctaccatgttgaatttatgttatgtttataatcttatataaacttacattagccaggatgcaatgaactgaaagaaacaagcataatatactttgatactataaaaaaaatgacactgatagagcagctaccaaattttcatgaaaagttggtcattcaaagtactcaagttgtgtttcaagccaaatttgtcagaacttgtatgaag

SEQ ID NO: 74177 - DNA, 239 bp, Oryza sativa
  unsure (1)..(239): unsure at all n locations
agcttcaagtcacattgcagactctcacacgtgcagtactcgtcctccacgtgtatagcatcactctatcagattatcagaaatgaatcttctgttcatgcatgcatggatcaaattcccttcacaatgtgcacttatagaaagttagaaaattgatatatagtactacctctatattttaatattttaatgtatgacaccncccgcatatcatattatttaagtcttattcataatag

SEQ ID NO: 74178 - DNA, 479 bp, Oryza sativa
  unsure (1)..(479): unsure at all n locations
tactcagcttagtactagacatacctatctacttatagtttcatgtgttctttgttccactatctcagntattgatcctttgtgccaatgctcgagcacccagtcaaccaacacatgttgttcgccctctggaacttgcatgattggtcttcgcccacaagtaacctcgagaataaatatgccaaaagcaaatatatcagtcaaaggagtggccttgctgctacggcctagttctggcgctaggtatcctatggtaccaaccacatgagtggtcagtgggtctgcaccacggtcataaagccttgccaagccaaagtcacctaatcgactattcatctcgctgtcgaggaggacattgctcgttttaatatcccggtggacgatcactttctcccactcctcgtgaaggtagagcaaaccagatgcaattcctttgatgatttgaagtctttgatcccaatctaaaacccgcttatcac

SEQ ID NO: 74179 - DNA, 108 bp, Oryza sativa
gatacttgatctatgaaacacaacatggaccggtgctactgcccaaattgaagttatacgcgcatatgcatccaagtttatgtcatgatggcatcaaacaatccaaac

SEQ ID NO: 74180 - DNA, 400 bp, Oryza sativa
atccgaaccgtggcgtacttgatttaggcttaccgcttaaatatcaaaccgaaacctgatgtcgctcatgggttaacatacccataataaatcatttgctggctaatatcttaactttgggaaatttacacttatagctaaacaacgccattaatatgtaagggagagaatatctctatctcatgaaacggttcaactctcctcgtatgtgacatgagcggacatgggcaatttccatgacgtcttacttcatcattataaataactatctcctcctcttattatgcttagttacttatgagcagcggaattgaaacatcatcatgttgatacacccacaatggtttcttagctgtcccatatggactgttttcatacaaccctaagactgtatgatatt

SEQ ID NO: 74181 - DNA, 495 bp, Oryza sativa
tacggacctatgaaactaagcttaataacttctgttgtgtgactctgccaaatctctgtcctgtatgcccttgctgctgggtatatgtgtgagtgcacatcaccaccaaatctcttcacaaagatcttcatcaaatgccagaagcattccctctgctcagcatgctcaaacacagtatgtacaaccttttctaagcctttacatgcatcagtacaaatagctaatggattcacatctcctatagccttatgaagatgtctcatgaaccactcccaattatgctaagtttcagcattaatggacccaaaagctaaaggatacatccagtgatgcccatcaacagaagtggcagcagccaaatgaccattccatcttccattcaaagcaacggaatctatactaatatatggcctacattcctatatgaaaccgtctatgcagggcctcaaagcatagaacaacctatgaaaaaatactttcccaccaacctctaca

SEQ ID NO: 74182 - DNA, 271 bp, Oryza sativa
  unsure (1)..(271): unsure at all n locations
agctntgatgttgtttgttccctggntcaccctcgcgcttccctcatatgaggagagcgggaatgatgaccgcggccgcgatgatggcaactaggattgggacaaggtggtcagcggcgctgtacttggaggcccaggcactccgtgatagcccaccgctctcctcctctatattgttatgtgctcgtggtgaacgctagaaactctangccattgtgccatcctggttgtaataaagcttctcctttgcactttacatacttgtcttttc

SEQ ID NO: 74183 - DNA, 473 bp, Oryza sativa
  unsure (1)..(473): unsure at all n locations
tgccgagttcctccgcatccgcccgcctaccttctctagctctctattaccccattgatgccttggactggttgcatgccgtggggaaaaagttggacaccgtacagtgcaatgatgaggagaaagtcatcttcgccgctcaccaactgcaggggcccgcatctctatggtgggaccacttccaggctacgcagccagagggacagcctatcacctgtgcccgtttcactgccgccttccggaggacccatgtgcccgccggagtcatggcccttaagaagagggaatttcgggagttgaaacaaggcaaccgctccgtgatggagtatttgcacgagttcaataatttggcccggtacgccccacaggatgttcgtgaagatgaggagaagcacgagaaattcctggcagggatgaaccctgagctgtctgtgcgtctggtctccggngactatcctgatttccagcgcctg

SEQ ID NO: 74184 - DNA, 374 bp, Oryza sativa
acactaaagcacttaggcattagagtgatctaactggcccaatgtcttttcaaaaaatgagtttcatatccgaccaaatactatcaatttatgttggctccggccatgcaatcatgagttgactagcggtggtgtgatagcatgctctgaattgatggaggggatgaccaccaacaaaaaccaagatcagaacacgaatgaaggatgattattctcatgatcagaacacgaacgatagataagcagaacatagaatgcttgtggccgcggagagaaatcacaaataaattgagtgtgctatggcttcacaagctttgccaaatcatccatatgtatactcaaacaatcacttcacccgtatagataccttatac

SEQ ID NO: 74185 - DNA, 475 bp, Oryza sativa
  unsure (1)..(475): unsure at all n locations
tgaagagatgcnagatatcttgtgacagttcaaggagtanatgtgtctctgtacaaatggggagcaaggaacatacataaacaaaactaccaaggaatgataaacaagctaagctagcagttnttttaagataatggataaaatccagcctctatatccaaagtggatatacacagccaaagctaagctagcagttgatgtattagtgatacaaattgtacatatctactagagacatatatgcagattacagagataccattgttggatgattgttgaaatgttctgcacacacatgcgcatgaaaggtcaaatataaatgacctatctagctatgattgaagaaagaagaacaaaaatcgagttcagttcaagatatcgccacttcacagctgcggtctggctcttgagatacctatatgctaccccaagctaacttctgttgaagttgaattgcgtatataccatttgatca

SEQ ID NO: 74186 - DNA, 305 bp, Oryza sativa
  unsure (1)..(305): unsure at all n locations
tgaataagngaaattatctcggagaaaactcttgatacgtagacttttcaaccaactcttagcatctgtcaatccttctgatttgcatagccctcatattataacattccacatcacattngcagaagtgaaggttccatcagcaatagtatcaacgacatgtgataatttatcaatctaaatcgtgcttatactgcaacctggaatcatgtcattatttacgagtttttgcagcaccaaatttgcctcatcaacctttccctccttatagagacaactcattaacgcactggatatgaacacat

SEQ ID NO: 74187 - DNA, 471 bp, Oryza sativa
  unsure (1)..(471): unsure at all n locations
tctcanatntgagcaggacgaaccagactatccttcagtcttatcatatatggtgaatcattacttagttgggtaaatctcagtgagttcattcattaggactcaaatttgagcaggacaaaccagactatccttcagactaatcagattggttgaatcattacttagttgggtagatctcagtgagttcattcattaggacagtttatgacctgcaagaagttaatatctcaatgaacttgcaatggtaattcaattaaactgaaaaaaaattgtagtagcaggttgtgttcctgattttgttagggaagaatgatctcatagccaaagagttcaaaggattgaagagctcatattaagaaaactgagattgccgctgccatccatctaatttgagaactgatggagatcgcttatctgagacaaacctatttagctcatccctgtgttgacaaacatgtcactgaagtc

SEQ ID NO: 74188 - DNA, 321 bp, Oryza sativa
  unsure (1)..(321): unsure at all n locations
atcctctgagtcacctgcggcatcaagcttttcttacaagatgggaagatgagcttgtagcttaatattttctagtttgttaagtctggattcatcactgttcaagataaaatgactagaacaatgttggcagaatattaaatgagttatcacatagaataattctccacaacatcaagacataatgagaaaggagtagcattaaatttgaatatgaatcaatagtgtttgcattagaaaanaatagtatccagtactgattcataatgtggatatggaaatcatggctactttcttttattgcggnggcccttagctact

SEQ ID NO: 74189 - DNA, 461 bp, Oryza sativa
tcatgagaaaccaaactccagaatgctagctcgatctttcttattctgatgacgcggacatgatatggcatatatatgttgcaatctactcgcgactaattagctcacgattggtgattttttaaaaaaaatttgctaaatgtcattcgttagaaaatttgtacccaagtcttaaaaatttctaatattgggatttaattcgagattcgtgctccaatgactgtagctcaattctccttcagctctagccagtggtggatccagaaatttagttcattggtgtcataacgtgtttatcggtgtcatatcatactaattatatttagaatatagtgttataattatggatagacagtttaaacatagcttttatcaaaagtcgtcggtgtcacctgacactggtggtactactgtagatccgcccctggctccagcaacggtgacagcaagacgagttagtg

SEQ ID NO: 74190 - DNA, 397 bp, Oryza sativa
  unsure (1)..(397): unsure at all n locations
ctgcagctntatataaaaagtctgttggttgtntgttaggcttataaagtatgcagcctaatggtgtgtttggatccaaggacttaactttagtctctgtatttagacattaatttaaagtattaaatatagactacttataaaactaattacataaatgaaagctaatttgcgagacaaattttttaagcctaattaatctataattagagaatgtntactgtagcatcatatagcctaatcatggaataattaggctcaatagattcgtctcgcgaattaagtcaagattatggatggattctattaatagtctacgtttaatatatataattagtatccaaacatccgatatgataggtacttaanaattttagtcccatctaaacagggttct

SEQ ID NO: 74191 - DNA, 397 bp, Oryza sativa
  unsure (1)..(397): unsure at all n locations
cttaaaactcagcttacaatttaagaaacctgctgacgaaaattcttgtttcgcactaggcgcaacaatcaaaacctaaacagaccaaataaatatcctatttggctaattaataggccattagatgacacaatttacgaaatattgaaagtggacgggatcattcggagtacggatcgaagtatgaatttagaagttatttgaatttctagaaaggaaatgattatcgaatctttggaaacgataactatggaacagggaaaatgatttattgattttctggattaaagaaatgattattgaatttgggaaaagacatatggggccaacaatggtgagagagagtgaattggagggacagattggactttggtcactggntggcggaggaaaatga

SEQ ID NO: 74192 - DNA, 326 bp, Oryza sativa
  unsure (1)..(326): unsure at all n locations
agctngttatcactctntctaacttcatcaccaagatgacaagagtccaatgcctggataacatatatacacaagtgaactcttttgcccatcgaatagcagatatgagttatgcatatttttttttaaaaaaaacataggtgcacatacgaagcattacaaattatactacctccattactaaataagtatatttctaacactcaagttttgtccccaanataagtatgcttctaaagctaactaccctctctcttcaatccatccctcatnttaattggggtatgaatgtcatgtattttctatagtaatttgtcttccatatg

SEQ ID NO: 74193 - DNA, 453 bp, Oryza sativa
  unsure (1)..(453): unsure at all n locations
ntagcgagagtacctctttattgtcatgtgcaaattctatatattttcaattntaaaattcatattatattgtattacccttggggctatttgtatctaacaatctgtctgagtattgatttcaggatagtcatatttcagagctttgtcacagattccacaactacttgattactcgagaatggttggacaactactcgattactcgagaacgattggacaactactcgattactcgagaacagttggtggagttcgacaaagattacggaatgaagcgatggtgtacccgctgagatgaaaattcttgacttcaacccaaattcttgattacgacaagacaaggaatgtagtcacatactccgcaccttctcgatcaactgagaacggttaagcgatcacgacgactgttgttccaaggtctccggtcgagaacatcaactcgttcatttg

SEQ ID NO: 74194 - DNA, 465 bp, Oryza sativa
tcctttagtagaatgatttccttaaccgaatatattttgatttcgactattggcgacttgataactccaatcggctaattccgagatgctgcagccgatactgattctaagccgatgacgtctttgccgattaccaaatttcactgttaacagtatcatgttcagtgttcataaaacacataatgaaattaaacagtgtttttcatatatcatgttcagaatccacaaaaatacaatgaatcaagcagatatcattgccataatccacaacacataatgaaattagggtgtctcttgctggtatcatgtttagaatccacataacacaatgaatttaggcggcctcttacaggtatcatgttcataattgtcagttacggtcgaatatgtgtacaaagtcggttacagtttatcacttgaagttgtactatgtataggaataaaataagagtcagactctatcct

SEQ ID NO: 74195 - DNA, 453 bp, Oryza sativa
  unsure (1)..(453): unsure at all n locations
tgggtgaccncattcccacaggcacgcgctccatctttctttcccacggtggcggcgtccacaggcagcaacggagatagggcgactccgttcagcggcgatggatccggcggccgcaactctgttcggaggcagatccggtagcggcgaccccgttcagaggcggatccggaggcggcaaccccgtttggcagcggatccattggcagccaccctgtttgaaggtggatctggtggcggagactccgagggcatcgattcccatggatggggagctgacctctaccctccctccctctggcttggaccgatccgcgctcatggaagatggatacggtgacggcgaggctaacaaggatggacatggcgacggtcgtgcatgccttgctccgggnaccttggcatagctcaacaagcatgccaagaccggtgttggagccttgcgtcatcatc

SEQ ID NO: 74196 - DNA, 176 bp, Oryza sativa
gcattcgactataacttcctcagtggagatcatagttggtggatttctaataaaacaacccgttcattatcttcactattaatcatgagaaggttgattagaataaccacacatgaggagggagacctatggctagggctatggattcatccactattactatttacatggaagag

SEQ ID NO: 74197 - DNA, 424 bp, Oryza sativa
  unsure (1)..(424): unsure at all n locations
tctacagaagatagcanaacacggagattcgtttctctcttcctcagaagatacaaaacgttgtctcaaacaaaaatgctcagagaaaatgtcaaatcctaacaccatttctcacacaaacagtaacatttcgcaggttcagctattatcagatgtactaaggaatgtaaagcctaagatgcaatcttagctgactgaaatttcagcagtttatggcgatcttatggcaaagacaaatctgattacaattagcctataaaaagcaaagcactacatgataacgctatcctgcttattttaagaataagataatcaatttcattgaagatctatacagacacatggcatatgagcactgtaccatgtgcggaccaaaatgtgaaattagatgcatgattaatacaattctagagcctaacaactg

SEQ ID NO: 74198 - DNA, 429 bp, Oryza sativa
  unsure (1)..(429): unsure at all n locations
gagcttcttctgtatgttggactcnagagctgctggctntgatgcaaaataacttaatttcttctaacgatgtgtgtcgtcgattaccaatttggtgatgcaaatcatgagaataagatgatagaaatcttcttccaagcaatatgccttgaatattcttatgaaatctcagaacatgatccaaagattcagtaaacgatccaaaactttatgcttcagtattcatgtgttattgggtttcaaaactcactatttagcattatttggatcgttctctcttctgaatgcaaacaagaaaccacaaagttgcatttgtgtgggtaacatanaattcctgccgacctgcgaggaaaactatccanaccaaaacccaagagataaataaacgtagcagattaaatccctgatagacatattgaagctcttcaa

SEQ ID NO: 74199 - DNA, 466 bp, Oryza sativa
  unsure (1)..(466): unsure at all n locations
acacttcagtttcagctgaaggacaacttgagagttcttttggatgggcttgtgctggtccaaatacttctggagcaggcagttcaaccacaaaggcttcaggaatcccatctgaatttcatgatcatctgttaaaaaggaggaaattgctttgggtcatccaagaacaggcatctgatcttgctaacatctgcacatctgttttggagtttgaaggatcgagagacggaatttaccttattcctgaggataaatcttccggacaatctactgacagaggcaggacatggcagcaaactttcttgaatctcctgacacgtctagatgcagcatatcgttctttcacatgtaagtgactactttttcgcacttctattgtatgtatgtttagatcaaggacccccaaacttgttcttgtgtcaaaactgcccaagatagctngccaccatgagatgcangcatatac

SEQ ID NO: 74200 - DNA, 414 bp, Oryza sativa
cctagagaattcttttagattatctactagttccatctgaagttgatattgctaggatacccaaattcgaatccaacatgtggagaacttaatctcttgccttatataaaccacaagtattgtgttgatgtatgagtagacttgagaaatgtcaaacattttagcttgagaaatgacgtatgtgataaactctgatccctagtcaacttatttgatcatccatacacttcgtgagtttgctctcctttcttttgcacacacaagtagttctgcagatgtgaatatacaaaactggtgtataatatttgtcatatatataatgagaaacctaatattgacaaatgcacatttacgttgtagtatgtatagaacatattatattcagcaatgaatcctctcacattatcatgattt

SEQ ID NO: 74201 - DNA, 472 bp, Oryza sativa
tcactcggtgagtgtatgggctcacccacaatccgagaagcttctgttgatcatctccttctccagccattctctgattaatctctggctgaacagtcgctcggtctcttggaatgcgaagcttggaggtggctaaatggtgttttggcttgtgttttgttgtgctagaacttgaccggagaaagatcgaatatatatgtttgtctgatggagggtaaccagtaagcttcatgcgtgatggctacgtggatttaaacaaccacataatgagaatacgagatatgtactgtattgcttaatggacggcctgttgaatgcgttcgatcacactgttgagtgttgagatgtcctcaaatcctgtgatcgtcgaatgtaagtgtgtgtgatggtgaccagctgactcatgcatcgatgagtggtgacagtataacagcatcattccaccagaccacctacctagtaagtgtgaaat

SEQ ID NO: 74202 - DNA, 413 bp, Oryza sativa
  unsure (1)..(413): unsure at all n locations
gagctgagtttttcaatgaggcagntcttggcataaactatctccaccaaaaaggattcattcacagagacatcaagcccagtaatatatttcttgataatttgaacaatgttaagattggagatttcggaagtggtaagtactgatatcatatttattcgtactctaacatccctatgacataatttaaatttggcctgccatcttaatacggcatgtttatctttctggtaggtgctttcatgggatctgcttcttgtttgggaaggggcaataggttctggngtactcagntccatgcgtctcctgagctgtggaacatgcatactcacaacgagaaggtaacattcaccattttctgtgtattttttacctgactagcttagagcccgtgcattgcantgaaatacaaa

SEQ ID NO: 74203 - DNA, 474 bp, Oryza sativa
  unsure (1)..(474): unsure at all n locations
tcgagaagcatctgatggagatgctggtggaggagaggaatgtgatggacctcatggacgtcgaggagctcctgtgctgctgggagaagctcatgtcgccggtgttcgtccagctcgtcggccgcttctacggcgagctctgcatggacctcttctccggccgcgacaccgacgtgtcatccgactccgaggatttgtctctctgacatccacggacagaactggggtttctttccaactgacaggtggacccgggtgtggatatttttgtggtcgtttaagctgtttctgtgttttgtcaatccgtggaatgcctatcctacgtcaaaatcgtccatcaccatcataaaatccttcatcaccttgtcaaattacactctcggtgaaggatatggcacctttcaacttccagttcgaggggattntgtacctttacctttgacctttgtaattcaaaattctgtctcagcacat

SEQ ID NO: 74204 - DNA, 453 bp, Oryza sativa
  unsure (1)..(453): unsure at all n locations
gcccattttgctggcttcacagttcatgtgatagtgggncactactgttcgctctaatttcagtataaatggggggagaagtgaatattcttgtangatggcgttcttttgttttcctggtctgttcaatctattatctctcaccgtgtagctgccaaagctattggtttcttacatcggctntctgccaaatctgttgagaattgtaccttataaagaatatatgtgtatttttttctatttattttctatcttttataatttgtaggatgctattgtacaaaaaacacatcatttcatacatcttagtttacccacatatgctcagatataatatattattggctagtccttgcctaactaagcataagtttcatattaagttatcattactagtcactgacgacggtctacatacggtatccttttcatgacagactctactaatacttt

SEQ ID NO: 74205 - DNA, 470 bp, Oryza sativa
tatatcctccattgcaagcttctttccacttcgacggccctccattggatcagatgccataccaatcccagcagggactcgctgattttgcagtgagatctggaccttcagtgacatagcaacgcaaattataaaatggaacataagaatgctaccaaagaataggttaaagaaaatgcgccatagaacttcaaatatgtcgcagagcaacttgaatgatgaatgtgattaccaatacaatgaagaaacttcagcttatgaattagagtacttggccaggaaagaaaaaacggtttgtgatagctggagtattccaaaatcctaatttccagaacatggtttgattgaaattcaaaataagagcagcgtcttggtgagtcagcatattttattttcaggaagaatgttgaatgatattttaaattatggactggagcaatcaaatagtcagcaaggataaccaattaaca

SEQ ID NO: 74206 - DNA, 389 bp, Oryza sativa
  unsure (1)..(389): unsure at all n locations
agcttgtttgtctcattcagaacattgacaagattgtagtgctcccatgaagaaaatgcttttgcagcagaggaagaaaacagaaaattctatgcatgggaaaccccagtggcagaatgtacatcatactcattatttgaaatgcttccgcttaaatgctcanaacattntaatgaaagtaagaaacagtggtccctcagttgacaacatcaaggaccagcttgcgtgacttcaggacggaccacctcatgcgacggtagtatgcggctggtagaagtgcaagtgacagtaggaagatccatttcacttccatctacatcanattagagtaggttggtattatgaaatattgcgaattgaaagtaatatataaatggaccaaaagtgag

SEQ ID NO: 74207 - DNA, 471 bp, Oryza sativa
  unsure (1)..(471): unsure at all n locations
ngaaggcatcgggtggcgtgaactccagaggaaggctgttattctctggcagatggctgctatcaaggtccaaagcggagaggaccaagctcctcctgtctctagtgtgtgagaggccaaaccaaaggccgtgctcctggcaatactcggcgagaccaacaaatggcagggtccagccggtggccactgtgctccacacatggctcactgtgttgaagcaatagatgccactatcgtgcgtggatatccagatgtccgtgtcaccaaccaccgcataggagtcgacttggaagtcagacttgtgggacagcagtggcggcggcggcgggagagcgcagcancaccagtcctcatttaatctatcctcgtaaatgagcccatggaagcaggggacgtttccgacctcaacatggtcaaggatatagaggtcgtccccaacagtgacggaagcagtaggcaattccagttggt

SEQ ID NO: 74208 - DNA, 297 bp, Oryza sativa
  unsure (1)..(297): unsure at all n locations
aatatttgcagcagtatgttacctgaggaattaactacgcgcagaattagttattactaataatattctttggaacacaagttngcatgaggtttcattttttgcttctcattggaaataagaagtttgtttgttctttttgctagaaatctctggccgcatacatcgaaaacgtcgcatattcaaatgccaagactgaggactngtgggctgccctttgagaggggtctggtgaaccagtgaaaacattaatgcattcatggacanagcagcaagggtaccctcgtgttaatgtga

SEQ ID NO: 74209 - DNA, 79 bp, Oryza sativa
cggtttaaactatcagtcgtaaaattagttagagcctaaaggctttctttggcgagatagcctaaacttgccaacaacc

SEQ ID NO: 74210 - DNA, 470 bp, Oryza sativa
tggtatcctctacatatcctgccctgccgcaagatgctatatttattgacaccggaccggactggcggtcggaccggaaaaaaccggaaccagcgcctctgccggtctggctcatctaaaagaccgcctgtgcaatcaaaccggtatagaccggctggaccgcccgattttgcagaaaaccgcctttcccaggcatacaagcaactatgccaaccaccaagccatgtgcttccttgtgtttggaacaaaggagttatttctttattagatactgaaccgctttggacctcgaccgatcagaccaataaaccagtaaaccgacggctctgccgattcaattgccggtccggtctcaataactatggtatataccaaagagcaagaacgagtcgtgtctgatgcgccactaatatctcacccctgtagcctctctcagtctctcgcgtgattcgtggacgattctgtatacc

SEQ ID NO: 74211 - DNA, 267 bp, Oryza sativa
agcttgtttttatcggattatatatatccaaaggtgatagtatataattcccttcgatgaaatcgatatttaaatggacccatactgtgtgctcattgagcattattaatcttgttcacgttatacggtatcacattctgtgacgcaagtgctgttatcaagtcatgcaagtgcaagttggccagggaacagactggactaattggcagcagaagcagtggagtaagaccagcaaagtagcaacgatccatcactagggagcaaatt

SEQ ID NO: 74212 - DNA, 466 bp, Oryza sativa
  unsure (1)..(466): unsure at all n locations
tgttccagacgttgaggatgcctgtggattatggagaatgttatgctttgggtgngaagattaagtttagaagctttgttcatttccgctgcgtttgtaagaattatttattatttttgtaagacgtggatctatgtatcaatttgttgtttgtgtactctgtctggtcctggacagagattttaatacatattctgcttgaaattcgagtcgaatttctgggcataacatgccctctccactaccagtcacaaggcaaagatcagtctcttcatccttatagcaagatctagcaaagccatcaggatcccagcttcacgatgaatttttagttgaatcattcttttctagtttgattcacatgcgagtaattctatcactcgtatgtgattgagccggtatttttttcatttgtacaaccattttgtgatacagatttacaatattcttatattagtttgtactc

SEQ ID NO: 74213 - DNA, 442 bp, Oryza sativa
  unsure (1)..(442): unsure at all n locations
agcttgtgttattgatgcttcgttcatgcaaaacaagcaaccttcccatgtgatgaaaaactgcaccggctcatcccaagtacataggtttttctttttttttttttagcctgcagatcatcttgctgcttatactttattttaccgccccactccccagcaagtacatccatgtaatacccatcaggccatcatactcttaaatggcctataattaaacccaaaaataagctgacaaaccagaagcatcctaagtaacgtgatttcatctgctaaatccaagaaaaacacagacaaaaatntccttctccagaaggcaccaaggaggctagaagaaagaaagaaagaaagaaaccagggcatctagctcccctgaatcccaggaaacccattcaagcactcacaatttccttcctgccacccattttcaccacccacattt

SEQ ID NO: 74214 - DNA, 332 bp, Oryza sativa
  unsure (1)..(332): unsure at all n locations
ctatgctatttgcttatgattcctgaggaaatgcgatgggtatgaggggatccacaattaaagaaaccttcttcacgctactattggcagtcccagatatggagaagaaacatgtcttctcaagcagctataggaaagtgactaaaatttgttgagccaaaagagcgacagaacgcgagagtatgcatgattggaaggatccaaacaccttcaaacatgtggtgctgtcactgtcaatatttaacaattctaatcatgcatattgaccatcatctctgtggacacanctgctagtgttgttccttaatcaattgtcaccatgtccttgtcgt

SEQ ID NO: 74215 - DNA, 419 bp, Oryza sativa
  unsure (1)..(419): unsure at all n locations
agctntctattaagtactcatgggccccgaaattccttctaaatcagtggctaagtcaggagccccgaagtttgaaagtgatgctgtcaggaggcctaaatccaaatccaaaacgtgtagaactttatctcttgttttctatggacaaaaagtgacgtggtggggtaaaagtatacttggagaaggtcttggtttggtccccaatcaacctctttgatcatccatgcattcgtgatgctcgccctcttttccttcgtccaagcaagtacctctgcaaacgaacacacacaaaactcattgtgttgccgccactctgaccctgccccccgctattgatnggttgtatgtaccagtttccaccaccaactagcacaattaataaaaggaaaattagcatttcttacacgcataccaataat

SEQ ID NO: 74216 - DNA, 271 bp, Oryza sativa
acccacgccgtctagctcgtactccaccgacccctccacgccaaagtcctatgcggctcatacgctccgggccgtatacttggacggaggaagctgaacgtgccctcactcagttgaaggcgtatctcagctctcccccagttctggtcgcccctgagccaaatgaacccttgctactctacttagcggcgaccccgcaagtgcgtagtgcggcgttgtgtgtggagcgcgatgaggacaatcctcattccgcgcacccccaccatgtgct

SEQ ID NO: 74217 - DNA, 434 bp, Oryza sativa
  unsure (1)..(434): unsure at all n locations
aatctttgttacatgatctgatccttgtatgagcaatttggtcgatctgaagcaccatagattcataatgcataaatatgttatcggttgaataagtgatagttttattgatactatgtatatcgcttcttgatagttttctaatacaatcatttattatatgaaaaatcatgagaaaacaagtttgatccagcaaacaaacaaacatatggaagaataaaaattttgtcaggaatgaattgatctcgaaaggtaaaaaagaaaaagaagagagaagttatccatctagctatttgaagctgtatgaaattcttatacttngcattgtgctactggnctagtacattagtctgaactcttgaagtnggcatgacttctgtgatgaatatcttcctttggatttttntccttcacttgatacttctaacaagatc

SEQ ID NO: 74218 - DNA, 290 bp, Oryza sativa
tcactcgacccggatcttaagtcactgagctgcagcctggatttatctcgccttggtcggaataccaaacggggctgaaaccttggtctttcccgactggtttggatcccagtcaagaagagagatcttgcccaagtcgttggtgatgaaatccacgctgcccgaccgaaacgccttgccgggagggatagacctaagttcctcgatgctcggagaccggaacccatcgtactgatcggcaagaaacttgacgctacccctacctggcgcgccaactgtcgaaacaagat

SEQ ID NO: 74219 - DNA, 411 bp, Oryza sativa
  unsure (1)..(411): unsure at all n locations
tactctcttaccaaacccattgccttactttgcaattaccttggaagaatttagaatcagttctttaacaatttgtgatgaaaatctggtgacataaattcatgcttaaatgcatcatatgaaacatgcatggaagatgaatgcatatatcttgtgtgggaatgagaagccatatgaaattattaagaaaagggtgggctgtcatgcactggcatatcacagttacttttgacttgaggagatctaccagtgatcgcacatatgacatatgaactaatttcttgctatgtacaagcatcngcagtagctttgtattgcttatcgatctatcanagtaaaaatatcagtttttgagttttttatattctgctactgatgtgataattgacgtgtaataaccttcactgcttg

SEQ ID NO: 74220 - DNA, 309 bp, Oryza sativa
agctgggctccttttattatcacaagaaaggccgatagcttctcaccacttgtgaatggccagaatcgtgaactattgaaggtgtatgtctgggagtttgcgcctgagccaaatacgggcaaggctgttacgtctatgccggtgatcaaatctgcgaaggtcttgagggcgccagtccaatttgagctaaggatgccatctggggaggacactgtgtaatctgtgatgggtattgcttgccgatagctacataagcattacatggagcttagcaacgccaagcggaacatgagggagttattcttattt

SEQ ID NO: 74221 - DNA, 348 bp, Oryza sativa
  unsure (1)..(348): unsure at all n locations
gaaacatagtacaagaaaccgctgttaaatccataaacgatagtcgatcggctagttgccgatgacatatcatttatctttgagccgatgtcatatgtggatcgatcggcaatcatgaataagttagaaagaactaaatctactcgatcggctggagatattaataatatataatccttatgtcgatatacatttaaatcaagtgaatgggatagatcggtcgccatgccgagacaatataaatcacttagatcaaagtatatattaacaacaagactatatatgtntatagcatagccgatcaaatagatctagcatgtatcggctaatactccgataccactctat

SEQ ID NO: 74222 - DNA, 203 bp, Oryza sativa
  unsure (1)..(203): unsure at all n locations
ctacaatcaaggacactctatgggtgtccccactaacagagaacaccctttgtgaaactccccntcgcaacaaggataccactagtagcccaacgatagtaacccaacgagtgtccctaacccaaaaaccccacgcaagtattttacaatattacctctctcttatccctccccctctctttctctgcctcatttactccatg

SEQ ID NO: 74223 - DNA, 348 bp, Oryza sativa
  unsure (1)..(348): unsure at all n locations
caacaaatccaatacaactttggtgcatcgccacccatntgttcttcttttcggcgacttctctcaacaagaggtaagtctcgatggcttgtgctatcggagctattatgtcgctttagatgttntatcatgacccatctgctatcatatgtcttagttaatctagtcttagtatctcgctttagccctatcagctagttctcactttanggttctcgccgatatcggcttaattgtcttaactatattagatagctaagggcatccaccatcctgaaagcgtttaattacttgattggttagactntaggtntctntatatactttgcgatgcatcatccctagtct

SEQ ID NO: 74224 - DNA, 415 bp, Oryza sativa
  unsure (1)..(415): unsure at all n locations
agcttggtatctgatggaaatgaatgtccgttacccttagggatcgagtatttctaatcatatgacgctgcttgatgaacgattacgaattggtacctctcttccttattctcgactattgcaaaaatcattcattaagtatatataagccaggagaaattttataatccttaagaaagtattcgagatagctaaattttacactaaaaaatttgttatctcaagataactacttagagatgctaaattntaaactagaagatatggtaattntctatatcttttcaagaatagtcaaattatccataagccagatagctagatagatgtggtgttattatttctattgtctgctagctgcatgcagactgcagtcactcatatatgaattgcgtcatgctcatgcatttctcat

SEQ ID NO: 74225 - DNA, 434 bp, Oryza sativa
  unsure (1)..(434): unsure at all n locations
agctttctctcaagtttagtttagtattctattgctagtggaataagaatagaatagtttctttagtcctcggagtcctcgggagaattcgggtatggctctaatagctctttcttcttttgtaagacttatacaattattagaatattcttctaaatatatttacggtactttacttcactctgattntttgagtaccgactttctgatatattattcgagatattattgtctagctagcttacctaggagatgcactggtgtgggtataatgttcacttatatgattgttctatgtcatgacgatgaatctagagtagtatttggtagcatacgtgaggtgcctaagctattgaatatcattattatgtggtatatgccgcgagacaatataagtgggtcgctgatggccacagctcattacgggtattcct

SEQ ID NO: 74226 - DNA, 117 bp, Oryza sativa
  unsure (1)..(117): unsure at all n locations
tatttctttgatctcttagaaggagagaaagaaacccagccatacgagtaatcatatatatgctccctctcttaagggtagatgatcaggcnatcttttgaccaatctatgaattct

SEQ ID NO: 74227 - DNA, 389 bp, Oryza sativa
agcttcatttggaattgacgttttacaggctagctcatggtaattcacgaactttacagagctcataaccagcaacctcaagcttacgttatgccactgctttcagcaacttcttcctcacaagaacttcagggttttggtcatctccttgacaagatagtattcagagagagctgtgacaaaactactatccatgataatcaaagcattcaaaaaccacatcgaatccctctccaaaaaacctacatcaaatcagcatgacagcgtatgaattgaagcccttcatcaataatgctgtttactgtggcagtgtggtattctttcctcctccgaaaggatgtagtcattcagaggaagttgcatgtacttttcatgactactgatcacct

SEQ ID NO: 74228 - DNA, 163 bp, Oryza sativa
  unsure (1)..(163): unsure at all n locations
atcggatgcgccccccccagccaacttaaggatgtgcaatgcgtcactgggtgcatggccgccctaaatccggtcatntcgacgcttggagataaaagctctacccctatttaaagctcctcaaacgaccgggccgttacttggacggggatgctaaccggcc

SEQ ID NO: 74229 - DNA, 433 bp, Oryza sativa
  unsure (1)..(433): unsure at all n locations
agcttcaacatttacatagtaatgcaatgctgccattgcgaagagtattaacaaagaaacatctaatagaatcgggagaatgaaagtataccccgagaacacgtcccactgctggattttgaggcagtattgcctccgttgatgtcgttcatcttcttgtttccaatctccattgacatcttggtgaaggcgccgatgcaacaacagtagccacgaagaacaagagcagtcgcgcttgaagcgctatccaaaaacttgattgcccgcctatccgtgcaagttctcaagtggacagagttccggaggcacctgctcgtcccttacacctgcgcgcgcaggtgaacagaaccggngaaggattctgcagcttaggatcagaggaggaggaactcgaagtgcaagagtcgntaaagaacttcttcagtcctttctg

SEQ ID NO: 74230 - DNA, 375 bp, Oryza sativa
  unsure (1)..(375): unsure at all n locations
ttcataacgaagaacatcgagtggaacgtaataagaaagtcattatgtttgcacgaacatagcatttcacaaaaagaggccactctcatgtttcatgcaatattatgctaatatcttgatagaaagatagatggtatccaagatagaacatcttttacagattgagaaatctgagaaaattgtaccaattcttatgtgagaaagttgacaaataacttaacatattatgaatgtgtctggcaagaattattgcaaccactataaagcacatgtcagttaagcataaatgcataatcctcgctgtacatggccctagataatcaantaccntggntcatctattataatatatttaacgaacaaaagttatgaaaa

SEQ ID NO: 74231 - DNA, 352 bp, Oryza sativa
tagtgtaagacatatatacagcggattatatctagaggaagacatgtgtttcagaaatcagatacgccaaacggaaataaataatatgaatgatggattgaaaaaaaaatttattattaagacgatgctttcataatactagtaaatgcaccataacaatcaatggttgaaggaaattcgtaccaagcaaaactgcaagtttaaatgctcacttattgtgtctaatgtgggaccacacaacaagtggtattttaatgaagttgaattttcttggtgggatggtaatatggctctaagaatagactacccatgaattgaatttcaaaagtcatagagagatagagatgtgaca

SEQ ID NO: 74232 - DNA, 208 bp, Oryza sativa
  unsure (1)..(208): unsure at all n locations
attctcttcagatcctgcgctttctccctcatataggccagctatccaacatacaaaaatggatgctntctttatggctaaagaaacaacaatgatattcgagcgcaatattccgcatgctctacataatatgagtatatttatgctacattacgaaatgctaaaacaaaatgatcttgacacgaacgcccaacttaaactgctgatg

SEQ ID NO: 74233 - DNA, 424 bp, Oryza sativa
  unsure (1)..(424): unsure at all n locations
agctttacttcttaccacaagaacagacctaagcgggaccaacaagagaatactgatgaagtaatgatactatggctttagaacctaagtgggactaggcagaaggataaatcaaacatcatttattaaaaagaaaggctctcttcctgatatcataaatagctggatgctaccaaatcataaatagatgacattaacatttacagaatcgatgagaacacactcaaatcataaatgctatgaaaagagcaacatatgtntccaaagaagagcaaaaagacgccccacactganatattaacctaatcaggcatgtanatatcttctacactgggcaagttgtaaattgaaaataaatggaccaacatattaatgcccaagggactaatactataacacaaatgggcaccacgttggataatgc

SEQ ID NO: 74234 - DNA, 96 bp, Oryza sativa
tcaccaacaacacagagtttggttcgtgttctatggctatttacacgcctaagtctcactattatacaccaaggtggtatccactgggcgccatgc

SEQ ID NO: 74235 - DNA, 345 bp, Oryza sativa
  unsure (1)..(345): unsure at all n locations
tctcgtccagacttgctcattccgctaatggtctcaagcagtgttacgccaaaaccgtagacatcattctttaccgagataacaccttcaacaatatattctggaggcatatagcccctaaatataacccaatacaaattaaacactcagaaatttcagtagagaaaacagaaaggaaataacttcatatggaattaataggatgccagatatcttacaatgttccacgaacgctngcattaatctcatcatcttctagcactttagctagtccaaaatcaccaatcttacggttcatgtctgaatccaggaggatgttgtctggttcaggtccagatggactat

SEQ ID NO: 74236 - DNA, 435 bp, Oryza sativa
  unsure (1)..(435): unsure at all n locations
agcttgttctcagtgagattttacaatgccaatcccaacacctggtaatgaatttccgattgtccagtatgcagatgatactctacttttntttgactgcttccaaaaagagcttttctgtctcaaggcaattttgaatacttttgcctcttcaactggccttaagattaactatagtaagtcatgcatgattcctctgaatgtagatttggaaaaggttgatcatctctcaaaattgtttggttgctctattggtaagttaccttttacttatctgtgtcttcctcttggaaccacaagaccaagaggtatagattntgctcctctagttgatagagtagagagaagactctcatcaaccacttgcttgttatcttatggggacagattgaccattgtgaatgcagttctttccttcctttccacttactacat

SEQ ID NO: 74237 - DNA, 241 bp, Oryza sativa
tcatgacattacagatatataatagcattaacgtatcattagatctacacatggtaactaagcagtaaaacatgaacagatcaaatatgcgcaacatgtcgaacacgtaccgaggtggcggaaagaccggttgctcggcaagaactacttgccggtgtgagcgtcgatgaaggcgcgcatcacgcgagtggagaggaatgtgaaccgtcgcggttgaacagggaacagtcgcacgaagcgc

SEQ ID NO: 74238 - DNA, 388 bp, Oryza sativa
  unsure (1)..(388): unsure at all n locations
attgtattgtaatacatcttgtatttccacaacaaaatcaatattgccatacatcttgtattgggaagatatttatgttttgccttgcattatgataagatctttttttttaaaaaacaacttaaggatggtaactaatttgttcgctgaatcactgttggacaaatgattaagaactaaacattgcccaccagagctttatgacctgaataacttcttgccccaaaaggcttttcaatgttgcaatacattttgtattggaagaaaatttngtttcatctggcatgcaatgaaatcactcaattttccctacttaattagtgatgatttattacgctacattggtcaaatcatagaaaattagtactattttatagccgcatacaaa

SEQ ID NO: 74239 - DNA, 396 bp, Oryza sativa
  unsure (1)..(396): unsure at all n locations
tcatgaccatgattccagctgaacaaggagatgtacttataagtttgatcaaccctttatacggcatgccagtggataaacagtagtaatggaaaaaaagaaagggtgaccatcatcaccaacttggaaaaaagaagtggaacagccactagcaatttacagatattaaaatgcgccacaaccaccagcaatttgaagagtgcaagaaccagaaagataattactttgagaaaggaaggcagctgcttctttactggaaaagatggcgcctcgtaagccatcaccctctgtcaacccttgatttgagcagcttgaacaattgttgtcatctgtcataacgccggatgaagaatgatcctgtgctgntggagtaatactaacttcaacatcattatg

SEQ ID NO: 74240 - DNA, 230 bp, Oryza sativa
  unsure (1)..(230): unsure at all n locations
ttctccaaacacaacttccatatggttggtggcccacagagtgattggttttgtgcatcgcacatatggctgtggcatattgttgacaaaaaaaaatcgaacacactggcctgngagatctgcttagctcctgtacaggtctaaaaattgatgagatgtgggcgtgccagtcagtttgatcctgcaactgacaagatatgcatatagtagatcaaaacagtcgatcaact

SEQ ID NO: 74241 - DNA, 72 bp, Oryza sativa
aggataccgccggacaatacgcgtctttttaaacagacatagagcgccagcatttccaacctattaacggca

SEQ ID NO: 74242 - DNA, 471 bp, Oryza sativa
  unsure (1)..(471): unsure at all n locations
ntgctcgattacaagctgacagcccttctcaacaagaggcttggtgctgcaaatgataattagattgtattatcactgttatgtgaactcttgaataagatgacacattgtgaccagatgacgaatggagtacccacgttgcggtaaggcatggcgcatgcccttgatgtcgcactctcccagcggccgtccataagcccgatttctgctcaccgccgtggccacgttggtcggctcaagctatgccttgttggttgtcgctgctgagcacgaaggacggaaggatgaagaatggcgattgcgaggggagcgcctgcttgcgttgagattcgtattggacagatgtcatgtanggagacgaagtctttcngatgaacgaagggacttgggtcctatgcaatttctgtggaaatacttattccgtatgcttgcttatgggtctaggaggcactgtgaatacatatattactg

SEQ ID NO: 74243 - DNA, 327 bp, Oryza sativa
ccaaacaaacacaagtatgttgcgctcatactccttccatactacaatataagagaatttggataaatggaactaactgcttgtcaaatctatagaccaacaagcgtcgcatagacctatccacaaccacttaaatcttcagaccgatggaggataaacaacgttgtccatggaaagcaaagaccaaccttcaaaaaaagccttataccacaaaacatattacattcataatacatgctactaaattagtaattcatagctgacaccacatgcaaggctcggagatacaagcaataaaggatacgagcgctgttcccaatatttaaa

SEQ ID NO: 74244 - DNA, 401 bp, Oryza sativa
  unsure (1)..(401): unsure at all n locations
cttgagtatgttntcttgtgctctaacatttgacatgcaggtggtactggacaaaaacaagccaaagatccaaactgttgtcaataagaatgatgctattcaaaatgactacagaacaatgcagcttgaagtcttagctggtattgattcccttgtaactacggatattgaaagtggtcttcggttccaagttgatctttcaacagtggatgttctatcctctcttggctcatatttgtcacacaacatttctgatttattgtgatngcagaataacaaaacacaatgaattcattatttgcacgataaaatccttacctacatatttgtaggttgtgggtgtgctatgtctcataagaattctattggttgcacttgaaccatagtttaattgctatcat

SEQ ID NO: 74245 - DNA, 399 bp, Oryza sativa
  unsure (1)..(399): unsure at all n locations
ctctaatcatttgttntgacattttcaccatgtntctgcatcccgatggattctgctttggcgtttgtgaatatgagtctcggcaatccatgctagcaacaattgagggttgtttctcggagtggtgacctcagtttgtagtatgctcataagttacctcgctaatttgggcttcactatgctagaattctatctgcagttatgacgggctgggttttattataatttcatttagctgaagtgcattgcttgatgtggtttcaagagggagcanatttatatctcccnctacttgtatagcatatggtctaaacaagtgaatatctgttattgtaggcctctccagtttctattggctcaaaagcatccattgttgaggagaaacgaactacaactcga

SEQ ID NO: 74246 - DNA, 77 bp, Oryza sativa
cggtggccgaccggcgggctcaccggacaagagggagtgtctgtaccctactagccgggaaagagtgcgaactattc

SEQ ID NO: 74247 - DNA, 313 bp, Oryza sativa
  unsure (1)..(313): unsure at all n locations
agcttagtatatgatattattgagaacgatgatatctggagttgctgcgttggctgctgagaaatcccgccaggagcaactacttgctcagagactacagagtgtgccacagcaagttcctggccatattgcacaaatattagcactcgcatattaatcattatcaaaacaacatgatacgggttgaatagacaccgggagaatatcggaacagcgggcgtgcacatcatcttcctttagcaagccatnctgttgcagcttcacaatgtaatgaacggatgctgaatcacccatagagcgatgatctcatata

SEQ ID NO: 74248 - DNA, 326 bp, Oryza sativa
  unsure (1)..(326): unsure at all n locations
atataacgtctaatattaanaacctcaccattntttagtgtccgaacgtaatataacagtgaatctctgaaaatatncacgtatattctcatcangtacaggccataaagaaatttaaggccattactaacagtggcctgatcgaaggcccatcagcgagccaattcagatacacccataaaactgattacaaaatgccctgattttcacattccctctctacctctaccctttatacgtgatacaacaattcaccttaactcactcttatggtcaatcattaaggtcctaaaaatctatttttaataccagtcaccaaccttcac

SEQ ID NO: 74249 - DNA, 364 bp, Oryza sativa
agcttattatgcatcaaggcacgtcatctacaagacaagagacattcaagaccgcctgccataatcacaaccatcgatctgtgcattaagtactattaccattccccatcaagcttaacatgcactatcctcgcttagctcaatgaggcccttcaaatatttttagaaaaaaataaataaataactgttgcaccgtgcagggcacatacgaagatgcgtctatatgggcatgtgcaatagttattaatagagagcatttagccttattaattacaacaatctattgatataggagagaggagagataaacatcgtcgcgacaattaacagcgaataaagtacgaaaaagaaaacatatatgaaa

SEQ ID NO: 74250 - DNA, 163 bp, Oryza sativa
  unsure (1)..(163): unsure at all n locations
tatgttacacatactattattatgtgtaagtgtactttcgcctatcttttattatcaaaatacgtttcaatntagaccgctcttaatccaatattttactgtgaaccagctatcttctcatttggtgcactatgtaccacctacaccgtgttatctagacatg

SEQ ID NO: 74251 - DNA, 384 bp, Oryza sativa
  unsure (1)..(384): unsure at all n locations
agcttgttattccagtatntttattgggaaggttctccttgcttccccgtctttccatgagtcaacataccccatgatgttgcacatcgctcctgcagaacaggtataaataaaacgagtaagacaaatatgcttaacgggtcggtaacaatgttcataggttcacatccagagagcactaaccaaagttgaagtacccatgcatcctgtctcgcgcggtgcatgccatgtacttcacttcgatatgcgtgagttagttaaagaagttcgctgactcacatatggcccgaattcgatgtatgataaaaaattggaccattcattcaactttaaccaacgaatattattgggtcattgaggtactatttcacaccaccgagctcg

SEQ ID NO: 74252 - DNA, 319 bp, Oryza sativa
gcttatcaagtactggtcggacccctgtgcctttcagaattaattagatcagatattgctcttttttttttgcgaggcacatattgcttaattaatccagtcattatctgcaactctctaatcattaatcaacagcactttgactcttcgctgcaagcaattaatcaaagtggcacactggcactgcatgctttgaacaaaatcatcatcaattgactctgcatctcttgtgtgacacgcgtaatcgttgtatcaattaattcagctaccatacagattactgtgttgtcaaacactctggagagggtcgtctttcctt

SEQ ID NO: 74253 - DNA, 317 bp, Oryza sativa
tcgttatgtaactaaaaagggtggtgaagtgaaacatgaacgcatgcgtgcacaacgagtaaatactgatgctgatgaagaattattaaaggtaatctctgacacatggatcttgtctcaaccaaatgacaattgcatctttcggtctctctgcatgcaattggggtactttattatgccaatttacacacttgcctctatataactagattgcatgggtggtaatagttgctatccttatggtctgaacttaatagggaggtgaagattaccgtgaccatgttgacattggtcaaggttctgatgaagagcaagat

SEQ ID NO: 74254 - DNA, 278 bp, Oryza sativa
  unsure (1)..(278): unsure at all n locations
cttgcatggattgcagntggatgtctatacggttttacatgttcatggagtccgctttctggaacttcagtgcttgagctggttacatattgcataatctgatcattccaaggaaaaatcagtattgaataaaatatatgttggttgaggataaagagataattacttactgtctgttcctgcccagttggagcttcgtcagcattagaatcattgctcacttcattcttagaactgatttgcttggttcggtcccatttttctagttgaatgaactc

SEQ ID NO: 74255 - DNA, 429 bp, Oryza sativa
agcttgtgaccaaggttcattgcatgatccaaggatacacatctagcaagattcatctgtcacatgggatgaagatcgtcgacgctatagagcgcctctgtgtcgggtaccattttcatgaggagataggcatgttcatgcgagtcctaaacgacactcctgctatggagaatgacatggccgaagctgctcttcggttcacgctgctgaggcaacaccactacaatgctcctagtggtacgtacacacacgaattgaactcttttgaattaaatcttgcaaagaaatctttttggaatgtgagttaatattgtcaaaccaatgatatataatttgtgcaactaacttatgtaaatcgattgatcgaaccacatgttcttgggtggttcttggacaaaaatggagactttaatgagaccctgcgacatg

SEQ ID NO: 74256 - DNA, 334 bp, Oryza sativa
acgctaagtacattgacctaaccgaaaattgaccattctgatgataactccatattaaacaatcagaagaattattcaactggatatgaacaatagaagcatataagtgatgccaatgtgctagattctgaccaactaaagctctcctgaaagaaacattaagcggaatagatcccataacactagcaacagaagaacttctcctgataatagtatataaagaaggatatttatctttaaaggctatgtttcctagccatttatcttcccaaaaccttatttgttccccattattcacaatccaagaacccatacttaaaaaaatatttttgac

SEQ ID NO: 74257 - DNA, 388 bp, Oryza sativa
atggaaatgggtatgaccccgcgatcataatagtatgaacggtatctaacacgaatcccctacctttgacaaaactctatataatggcaagcgtcatatgcatgaaaagggttatccatgatatacttgcatatggccttggtagggtaaaaataaagccaattgaaggaatgagctcttaaaacaattttgaaaaacaaattcccataagtcaccacaagatttgcaagaatttctttcatctttaatcatctcacatgtaaccatcacttagatgtataaggttccctaaatatggatgggtcgtcacaagtacaagttcggctgacactaatgatataccagattatcatagaagaaattcttattggaaatttacttttcctat

SEQ ID NO: 74258 - DNA, 456 bp, Oryza sativa
tctcgtatcgggtagaaaccaaaggaaacccgatacatgcctttccgagcaaggaaacctcgagacccgacgaaacacagtcggactctgacctgccggtcagaccggccacacaccaaagtacactaaagtatctactcatgttggagaccaattgtattgcaagacaactattactcttgttttcgacaaggaagatcttccccagctatatcattcaatggcaaggctaattgtttcttgtatgctcgtgaaggtgtcgcttcgcaagttgtttcttctatgctcgtgaaggagtcgcttatgaagcttcgtgtcgtctctgtcatcatttcaaggatcgtctagagaatactatatatcattaccatccgaagcatggtgacaacttttggatgaacgattgtgcatgtgactatgataatagatgctattgatgacgctcacgcttgatac

SEQ ID NO: 74259 - DNA, 189 bp, Oryza sativa
actagacgggagattatttgccaacccaaagaacaaggggggtttgggggttcataatttagagattcaaaatagatgtcttctgagtaaatggttgctcaagttaataaatgaaaatggtgtttggcaagacttattgaagagaaagtatctttataataagtctatcacccaagttgacaggaaaca

SEQ ID NO: 74260 - DNA, 352 bp, Oryza sativa
agcttcctttatatagattgatttccttaactgaatatagcaggaatccgactattggcgacttgataactcccatcggctgattccgagatactgcagccgataatgattctaagccgacgacgtctttgccgattaccaaatttcactgttaacaatgccgaagtgggaggagatggaggcaagcttgcttgagaggggtatcgaaccggccaccgctaaatggccggatcaatcggagttctggtactatgctcatggtggaacgctcaacccagttgatggctcccaggtcttcagcgatcagatatgcgaggctgcgcgtcgactaacggacgcagtggaagcctct

SEQ ID NO: 74261 - DNA, 486 bp, Oryza sativa
  unsure (1)..(486): unsure at all n locations
ctcagcttaaanattcgtcaaaaagaggggatgtcatgccaaaatttctagtgtaatttatttggtgattacatacaaatcggaggtgcctaaaaggtttgcaaattcatcctccaatgttttttatttgttatattacatttgcagctatgttttgcacacttttttgtctccaaaatttagttgtaagttgatgagagagaaaatntgtgtggggaagaaagaatatatataaatttagttgatttgctaaagaaggttctataaaatagttgagaaggaaaactctagtgaaagttaatcttaaataatagaaaacaaactataatgaaaattaaaagaagtaaaacacattaaaattagttttaaactttagaaatagtanataagaattatttggtgtaatattctatgattnttctatgaataaagctagatatgtcattattgtatgactcgttgaaacagttgtaatatcttatatta

SEQ ID NO: 74262 - DNA, 385 bp, Oryza sativa
  unsure (1)..(385): unsure at all n locations
cactattttcatctttggcatgtccatgttaactccttaaaatattggataggaagctgaatttgatctggcaacggccatcaaaggagctgggtactatcgccgctcgttggagacggactttgtttcggactatctgccactgactcctgatgaatttcagaaggcaactgatcacatcangtaccatctctcanaacaacttaagcttggtcaattcagaatccatgcaattcccctttacagggagcaaatttcctactgttggagtaataactaacaaattgtcacatgaaactgaacattttctactggatttctgaaactttcangatgttgcagtacatagcaaacccagtgatgctatcaacactgtctgatggaa

SEQ ID NO: 74263 - DNA, 295 bp, Oryza sativa
  unsure (1)..(295): unsure at all n locations
atatgcacacagaaactaacagagatataaaagctatgagaaaacacataaatanatatcatttggagagtctcaaatgcggagctatctacgttatctctctggatgaatgcatcacacggggtagctatcatgagtattgattctacacgatcattactgaagttccagagaacatatatttcttatggcatctctctctattcgcactcccggtggattaattgcgtactatctctttgctctataagacaatcaaggaaaacgtgcgagtatatatattttttcacatcta

SEQ ID NO: 74264 - DNA, 435 bp, Oryza sativa
  unsure (1)..(435): unsure at all n locations
agcttgcttgtctgctctccgtgtaacaataagtcatttacagtgagcgtctaaacatatggtccttttaccagtgtagaaccctttatggtagagatgtattttaataatcgtcataaacaaaatcagtatgtccggaaacacaaagaacataccaatcgacatatttcacattttctcaaataaaaaaaatgctaagatgcaaatgtcacgtcaaagacatcttatccaatagttcggcgtgaggcatagcttattccaaaccaaaccaaatctagaacctcgggtactggcacaaacaaattcaatatggtattgctagggaatctaccttgatgcttgggganaaaactaaacatacacacacacaagaaggaatgatataatctctcttttacagacagcacaaggatatattacattgcagggatacat

SEQ ID NO: 74265 - DNA, 282 bp, Oryza sativa
cgtttatgtgtgggtaatgtccccatctcctcatacggcgggcttgtatttatacccatatgtgtccctttgttcaagtagaactatggaaaccaacattgtttcactcccagtagttcttggcgtttccatgtagaactctggttggcttttctttatcggaactccttctatatttgcaggcttgtctccgataaaacatggcatgtggtgtgtcctgccgagatatattccactactattaagtatgtggtatccataaccctgacagtaacccccgac

SEQ ID NO: 74266 - DNA, 331 bp, Oryza sativa
  unsure (1)..(331): unsure at all n locations
cgcgttccatacgatngagattctctggtactacgtgttgtttggatgctatactaagatcgccaccattcaccgtactttttatgtcacacttgtctaagttgtggcttacaaacagtgagccacaccttaactagcaaaattggaatgtgccacactttaaagtagtgatgatatgtcgggccctaatagatgataacgaatctctgctatacgatggctatgaaccaataatatgcaacttgtcaaacatgctacatgacgagggcaacataagcaacatggggagtaaccaacacccctagttttcatagaccaagttatttcataa

SEQ ID NO: 74267 - DNA, 368 bp, Oryza sativa
tgaagccaaaatgttgagaagcctgcaccactagctagctactcaatccaacaagtgtttttatccataccggcaagaaaactaatcacttctggaactacgaatctcgactattcatctgtggacacgtatccttctagtataagggttttattttatggaggaagtaagtgctctcgtgatcaaggctgccgctttgattgctaaagactgcagcgacgactcatctgaaagttgacagtaccatcaaacgattgtgtaaacacactactccttgcactgatcgaagtgctagctttaccattcgatcgatgcgctctactataacaggcagccggtgttgctactcacctgtgaaataaaacaat

SEQ ID NO: 74268 - DNA, 283 bp, Oryza sativa
agctcgtgtgtctctcatagtagcactatgataggtcactctgatcaccgagacatacacaaacacatcgacgttgtatccctcttaatagtacagcattcctatactcaaatataaataggaagagaattatactccgtggaatgccttctttttcatttgcttcctttgtcttaaaggacgccaatgccaaaaccgtttcacccgatatatcttcaatgattgatgcggatacttggagcttcaaatgggcttggacggtccattatgacaaagccatcac

SEQ ID NO: 74269 - DNA, 328 bp, Oryza sativa
cttcttcatggcggcattttcttcgattattttcatcataccctgcccttgttgaaccggtctgaagcaacgaactctacctaacgatcccttaactatcggaatacgtcgaagttctgtgtctgcccctttcggatgtattttcggtacacaactcccctgaaggtctggaactgttctggcattatctaagagtacactcgttcactatgttctttcgacccgcatggagcgtgaacgtcttgagcatagtggtcacaacatctctttcttgatttcggacaagctgtaatatctccgcgtgccttgatttcgcttgacaccttgc

SEQ ID NO: 74270 - DNA, 270 bp, Oryza sativa
aaaatactgaatatgcatgacttaccgtgccactgatcgtctagtctgatcacgttcagacagaccatgaggtcattaattggattgtgcgcctgcgctctgattcattcgcaatggtcactgacccactacaaagacgtcttacctagccgagactgagaacgctctactgtctacttaacgacacagaagatgccatttaatttgctcctgtaatcaagctagtccatgctgctgctggtggatatggttaactgcaccttctgacac

SEQ ID NO: 74271 - DNA, 437 bp, Oryza sativa
  unsure (1)..(437): unsure at all n locations
agcttctttatataactntngntctccaaaaaggaaaaaatggaaacacttttggttttcataaaccctcacttggtgcttctccttgactctctcctatctctactctatctagtggattcttcccaacatgctaaaaacagcatcctactttcggtggctgtcaacagtgcaaggtgggcccggccatatgtgaccaccactgttacacttgcaatgcagcgcactgcagctaagctagtgaccgtcttctatatatgcatcatgcaactagctgcagtgcaaattaaaaggcatgcgttggttaaacccaaacttaattaattaccaaagctgaaagcaaattaaagcaaaaacgaatggaattgcttgaaaaactgtcgcaagtttttttttaaaatactttcaatgtaactatagtatagtatagttatagt

SEQ ID NO: 74272 - DNA, 474 bp, Oryza sativa
  unsure (1)..(474): unsure at all n locations
tcagctcgtaccgngatctctgagtcacctgcagcatgcagctctgttgttgatgtgantctcatctgacctctgtagatttttcatgaacatatcaacttgtttcataactgggaatggctctcacgaacaagcaactcagattcactttctttatattcggattactttccactatgctcttcatgttgtcatcatttagcattcaacgtatttctttacaccttcagccttgatgtgttctttcccgatggatcgattgctagcatagtgcgttgaacgatactagtgcaagtgcttttattctagtagcatctgatgcagagcccaaggttgaaccgagctatagattccaactattcaagtttacttgttgacttcttggcatgtcacaaaagttccatccttgtcctcatagaatcacttctacctgtggtcatctcgcttactcgcgaaatcatctgctttgatgac

SEQ ID NO: 74273 - DNA, 376 bp, Oryza sativa
  unsure (1)..(376): unsure at all n locations
tcgtcgacaacaacgtcaacaccaactccggcaagttcttctacctcgacaatgctggtatggactcaagtcggcgaaatcgtctgcccggtttacaccacaatgccgatctcaaccagtcgtccaatgactgggtacgagaacgcggtggttacaaaccaagacgcctctacgtcgaaagatccacccgttgaaacggagaacggattgccgactacatctaagttcgtgaaggattctgatgcgaccaggccttgtccctccgacacaaaccgcgggccagcaaagatgacttccgaaactatcaggtcttggtgtcctattcataanaccaagaaacatactcttcaagaatgctgggtattcgtcaatgctc

SEQ ID NO: 74274 - DNA, 415 bp, Oryza sativa
agcttgttttctgtctaaagatcttgagttgtttgcaaatggtgatttgaccgagattggtgaaagaggaattaacatgagtggtggacagaaacaacgaattcagatagcaaggtcagtatatgaagatgcagacatattcctttttgaagatcctttcagtgcagtggatgctcatactggaagccaacttttcaaggtttgttctgtttggttaaaactttcaataaatgctcaagtatgaaggttatgtcttaactccattcttcgtggcattaactccattcttcgtggcataacgttaataaaataaagggcaaaacctatttcgttacttttagaccaataatcggtagactctaagcaaatgaacacattgccttgcacgattgctgatgggaatcttaaaacaaac

SEQ ID NO: 74275 - DNA, 328 bp, Oryza sativa
tttctctctgttgttgcagtcttgctgctgcccgatttcgtgttctacgaggcaatggcatcctctgctcctgcttgggtcccctacgagccaacgagagattgctctcaagggctgtgcagcatgtactgcccccagtggtgctacttcatcttccctccgccgccgcccttcgacgtcgccggcaccagcgccgacgactactccggccctgtcttctcccctctcgtcattgcaatcatcggcgttctggccagcgccttcctcctcgtcagctattacaccttcatctccaagtactgtggcaccgttagctccctcacgggga

SEQ ID NO: 74276 - DNA, 318 bp, Oryza sativa
tattgagtcttaagaaagcatccactgaagaaaaggacaagttgccggcttgctggagaggaagtaaaaaggattaattaacttggggtttctttcacaagtagtcatactacaacaaataaattgtatccatcatttaataaactataaaaaagtacattctttttccgaatggtacttgtatgcctatgcccaagaaccagaccgacgaaacatgtaataagtcatgtatgtaggaataattaagtctttctcaattaatagcttatctctcagtcagaactaatattgatttttttaacaaaaaatgcagtgtaa

SEQ ID NO: 74277 - DNA, 336 bp, Oryza sativa
gtcgtctgtagcccaaacacctcttgcttagatgcatcaaaatgctcgttggattcgttgacatctgctaaaagccttgctacctcaatttccaaggcagttgtctttcctttgagcacttcaatttcagattctctatcttgtaatgcagactggatcttacccaattcttctgttgtggaggcaagcgattcacctttgaacttatctgagagagtaactgcctccaattccatttcaagcaatcctgccttgtgcttccattcttcgaatagctgacgggcttctgattcggccttcttcgcatcagcaacctctgatttaagctcctcaatc

SEQ ID NO: 74278 - DNA, 398 bp, Oryza sativa
  unsure (1)..(398): unsure at all n locations
agcttgaatttatgcaagattgttttgcaaatacttgattntaaaccactaagtgattttattctataagtttacgtcgaataaagacatgcatctcgattcgacttaagagagatgctttcagcaactcatatggcaatgcaccgacttcttatggcggatcattacttctcggctcacggagccatttcacttgattaagcggctccctgagccttttttattttctcggactacaggagtcccgcctgcccgcagcacaacaatctgttgtcactcgggaagcctagtctatgatgcccgcatacatcttggatcacatcccgttctgaccacgcaagacattcatctaccacatatgctgattttggtaatgattcccaattcacaacaacttt

SEQ ID NO: 74279 - DNA, 433 bp, Oryza sativa
  unsure (1)..(433): unsure at all n locations
tctgcaacataggccacaacttatgcttctgattattcattcaagtgtngaagagctgctcgagcggctcataacagaactgaacgaaacctcttttgcaggtagctgagccagtgttcttggtggtccatttatttgtggctgggtcaaagaagttctcaccccaaagcctctccattatcttaaattcatcaactcccaacttggaagcatacatcttatcaaagctcgagagtgtgaaagcccagccatgcagaccaacagagaaagcaacagttgccttctcatggtagacttggacatcaccaatgagtgtgtcttcatatgttgccataatgacattggcattctcaatgacacgggagaaggtctgatatgcctcctcaccttcaacttgaagctcaaggaagcacctgtccatcattgtcacagt

SEQ ID NO: 74280 - DNA, 415 bp, Oryza sativa
  unsure (1)..(415): unsure at all n locations
agcttctttggtgtaagtttcctgctgatgcatatcttcattcttagtgaagcctacggcagtacaatctgcagtggccgggtctcctaggtctcctgttgagtggtctcatcagggcaaggttctaagaacacagattgtagtggtactggatcattggaaccagttgcaaaccttgtgctaaaacaaaaacatggtgcattacgtggcatgaagtttttgatgattcgaaggcttgtggtaaagaaaaacatacctgttactcacactgactggttctgagattgtagtagtagtagtagtaatggcatatgcccnctttttcttcttgttggcaccaaaaaaggaagaattctttctttntttttgtgggatgcattggccattgcttcattggctgggaagaccatctggg

SEQ ID NO: 74281 - DNA, 401 bp, Oryza sativa
caagaaacgaagaacaagaaaccgtggttaaatccataaatgatagccgatcggctgggtgccgatgacatatcatttatctttgagccgatgtcatatatgcatcgatcggcagtcattaataagcgagagagaactaaatctactcaatcggctgtagacattaacaatatatagtctttatgtcgatgtatacttaaatcaagtgattgggatagaatggtcgccatgccgagacagtataaatcacttatgtcgaagtatatattaacaacgagactatacatgttcatagcatagccgatcagatagatctagcatgtatcggctaatactccgataccactctatatgaagatatcacagcaggtaaaatatactaaaccaatgcctaatatact

SEQ ID NO: 74282 - DNA, 388 bp, Oryza sativa
  unsure (1)..(388): unsure at all n locations
tcatacttttatgcctgtcccactataaccgagagggttttgtaacacacgcatacaaattaaatgatgcatgctctagaacggagaatatattattataaatatgctcactctttaaataaaaataacagacctgatcttatgaaacacgaatacctcatcaacaactagtgaacagcacgtaatcatcaaagtaatgatagacctgccaacataagtcactataaattatgaaattgatttaccatgagctcaaaatatattatgtgtaaattatgaatagacaaactattcaggatgtgcataaagtgaaagttcactaatgcagtaatctgccataagaagcatgacanataccagacatatatgtctaactgctcaacttaca

SEQ ID NO: 74283 - DNA, 370 bp, Oryza sativa
  unsure (1)..(370): unsure at all n locations
agctttgttatcacttggctctccgggcagcaagctacgagaatgcccgctccgtgattcatcacctcacctggcttagacatatgcggaatagctttgggctctggaactctaccaatgaactgtgcaaagacaacaaatttacaaaaattaccgagggccaaaacactccccgcctggatccccaaataccggtgaatatcacgggaatnaccatccatactctgaatattaactatttggcctggttagacactactatacttatgcctgttaagtcgcgaaaagaaaaattttgaatgcacattagaccgtcgacccgatagccgtaagggttttcggacaccaatacaaaaaactaagtttataa

SEQ ID NO: 74284 - DNA, 404 bp, Oryza sativa
atcacgcttgacgagtcgtcgcgcagccccggtagagtcgtacagagagccccccgaaaaaagaataaaaggttgacgaattatacacgccaatacagctgtaatcaacagaaaagatcggcggaacggcacgaccggactactccaactgtccaacacaacgactgatgaacaagttatcggcgcagaggatccactcgtcgatgcggctgctggaaatcggcgtcctttgtggagcgttgtcagcactcagcagcagagggcgatgagcccgccagacagccaaaggagaaccgcgaggcgggtggaagcggaacgcgaggcgctgacccgagtcctcacctattattcctcgccaacaccacgtgcccacccaaccagaccaacagtagccaggaaagcgt

SEQ ID NO: 74285 - DNA, 429 bp, Oryza sativa
  unsure (1)..(429): unsure at all n locations
agctttctctatttatcaaatttcttaaccgaatatagcaagaattcgacaactgacgacttgataactctcattggctaatctnaggactttcaagccgatgctgactctaagccgatgactactccgggcttaccaaatttcactggtaacatgtcccaaatggggacatttccatcgtttggcaccacacaagtatagagatgattatatatgccagtaaagaaatatattggagataaaatgatcgtgtattcacacttcactacctcaaaaaacttaataaaacctatggataggtgatcgcgaaggaagacgttcctcattatattatagtagagaagctatctgattatgctcgaaaatatgaanataagtaattatgtgcatcttatattccaaacgatggaataaatatgctctgaaatg

SEQ ID NO: 74286 - DNA, 385 bp, Oryza sativa
  unsure (1)..(385): unsure at all n locations
ttcatgtgtgtctatatatatatatatatatatatattcagtgcgatctatggacgaactgaattagcatttgtagctatgtaaaggtagagaaaaaaaggaagttgtacgtagctagctagagctctcattngatatgtagctcggttgctttttaatttatttctgcgaggaaaactgcatgctccatgatcacttgctcgctgctagcttttagttattgtactacagtagaacgccgtactattaattgtacttgaactgttaatggaacgaatgccatcgatggatggatggattgatatatgtatgcaatcacatcatcgacgactgaatctatcggatggatctatgatatgcatgacgatctctatatatatatata

SEQ ID NO: 74287 - DNA, 231 bp, Oryza sativa
acaccaaaaaaaaaaggggacccccgccctaggaaaaacccggggtaacaccgaaaagaagtcgccccaaaggctaaaaagggcacccggccaaaaaagaacctcgtttcttgcagcggcaaaaccacgtaaaagaaacttcctccgcccaaaacacccaatcagtctccaaaaaaaaacaccatactaaacccgccgcgtgagaccgacccggccagaaacaccgggagg

SEQ ID NO: 74288 - DNA, 340 bp, Oryza sativa
  unsure (1)..(340): unsure at all n locations
aaaaaaaacctacttaacctcagcaatccaactaagctggagatggcagctgcatcaactctagggagtagagatgccagcgggcagtgggaaatacacaatggcaatcagatctgctatgctgcctctgagattacctgctatacacaatgcgggatgctcgttaagcatagcatcacccagcagagggatccgtggcttccgatgcctcccatgtaaaatcaaagatgtttttgattattattctgtgatgaacaatnggcatctgacattattggttttgatatttggagaatattggcgaagtggtttttggagataattggatttgcaagtgaac

SEQ ID NO: 74289 - DNA, 371 bp, Oryza sativa
actaagcttgcttctcttctccacttcgcatgcgatgctatatctttcttatctcagtggtgacgggacttcttcttggtggcattttctatgtttctgtccatcatcacctgaccttgttggccttgcttgtaagcaacgaactcctcccagtgatcccttatctttgggaacgtgttgaagttccgtgtgcagcccttctagatgtatctctggtagagatcatccttgaagctctaaaactattctgccattctctttagaagtcaccttttcactatgttctctgtacacgcgggaagggtgaatgtctccagcattgtggtccacagcatctctttctctgaatctgggactaagttctcgtgatc

SEQ ID NO: 74290 - DNA, 403 bp, Oryza sativa
  unsure (1)..(403): unsure at all n locations
cggatcttgagtcactgcagctgcagcttgttttgtacatcgatcagcgtaccagagctgatgatttacgaattactgttcatgacctttgtgcagcccctgctagatttgttcctgggagatgcaaataaaacagaataatcctatgcgacacaaaactggcaggttcatgccaagttaattcatggaactatttcgtgccagccaccattgtgattcaacaaggttacttacattgtctgtacggaggggaaattggtgatcttaaatcgaagaaagacttgctgagttttgctgaagaagcaaatatccatcagtctacaaggaatggttcgactntgcgtattgttgaggcttgattataagtgatgactttagagttggtgaatggtggtttctttac

SEQ ID NO: 74291 - DNA, 187 bp, Oryza sativa
  unsure (1)..(187): unsure at all n locations
aactaactatcantgacattaaaggtgggctggtttttttttatagaaagtgtagtcctttatcttagaagggcaagcttatgttccttatcatagtagttcttttgccgacagatgataacccatggattaatgaccccggtcatttacatttacataaacaattgccatcgccctttacttttac

SEQ ID NO: 74292 - DNA, 314 bp, Oryza sativa
  unsure (1)..(314): unsure at all n locations
ataatgtaantcatgaatttctttgttcattcaagggtaaaatggtcatttttatagaaaatacacggtcaactaacggtcaactgacgggaggggtatgcaagggatcaaaatcaaattttgggggtatataaggaagtaagcaaaattcacgggtataaaacggattacgaaaaaattcacgggtatataacggattttctctttggaatgggtgaggcccacctggggggtggtcaccgacgaatgggcccccaccggatcggacacgcggcatgcagcggcgcaacttctagaagtaccgctcgagacat

SEQ ID NO: 74293 - DNA, 384 bp, Oryza sativa
tgcaactttgtagttgatggcattaccatttgatatcatttatagtgttaatatatgtgttacaagttttataatggtgaagtcaaaacaatagcatcaattccatagcaattagcaatgaagtggttcgtaggtgagatgtttatgggaggctacatgtgaattgagaggtcaagtttgaatcccatatatatatttgcacggatgcatatttcatggctaaaaccgtgcacatatgactactaaaatatatatgaaatattttttggggatttattccctaagcgataacaaatgtactggaaatttattttcacaaacgattcttcgaagagagcgtcgtctgcaaatatacttcatacgtgattgtggaatccgcatgta

SEQ ID NO: 74294 - DNA, 421 bp, Oryza sativa
  unsure (1)..(421): unsure at all n locations
agcttttcgacaagagttnntctggccaactgccctcaaagatgcttgcgatatggtaagacgctatgaagcctgtcagttctacagcaaacacaccaagatgccagcacaagcgctccaaactatccctctgacatggccgttctcatgctagggactcgatatactcggaccggtttcacaaggatgaggagaatacaagttcttgttcattgcaatctataaattcacaaagtggattgaggcagagtccacacgagaaattaattccaacaatgccatcaactttatcaaagagatcttttgcagatatgggttgcctcaccacatactcaccgataacggctcctagttcacaagcgaggatttctaggagtactgcattgaactatgagtcaaaaattgcttcgcttcagtttcc

SEQ ID NO: 74295 - DNA, 425 bp, Oryza sativa
  unsure (1)..(425): unsure at all n locations
agcttatcttgatgtggttctcacgggaaaaagccccgggaaatgccccggatcggtcgctcgaggggagggagaaatatcgggcgctccctccccccacgacgcgcgcttcctgtccctgggccccaccacgtctctacccctcacctgccacttatcactactatatactccattgcaacaaattacccacatattttggaaaccctctattaagagaatttggtttattttttattccacaaaatatgtttcacactactagggaaacgacttttaacgatgggagatttggtcgttaaaagtctaaatgtggtccgtaaaggtcactaacgaccactaagtttgtggttgtcggtgggttgtaaaggctcccgcgttatagttntaacgaccaaccaattttacccgtcggtattcattta

SEQ ID NO: 74296 - DNA, 387 bp, Oryza sativa
  unsure (1)..(387): unsure at all n locations
agcttcttttgcgtcttcttccacgcatgtgttgttgctgcatgctcgtgactcaactctcggnttgctgcagtctatagtgtatgtttgttccatgtttcattatcttttgggtagatgatgatgtgcaatattttttctttgatgttccacacaataggctcttgatgatgcaattacattttttcaatggcacatatgtgtgaaacatatttttactaaacaatgaaacatttttcactgagtaatggaacacctgagacaatttttttgttaaaagaaggaaaaagctttgcctcgtatatatttgataagtaggagagttaaaataggactgatatttccatgtgatttggcctaaactttaattcaggtaatcatcttctt

SEQ ID NO: 74297 - DNA, 412 bp, Oryza sativa
  unsure (1)..(412): unsure at all n locations
cacttcatctactgcacactcaaattgttgaagaatcgttgatatgtttcttacccaacacaatatgaaggcgatggatcgacggcaacctgatgtcatggtgacggagaccccagcatgccatcacccttgaccacataggagagattccctactattgactgcatttacaccacaagggctataagcatctcattaaatcataatatggtcgatagaatgtgcacttggagtgatcactgtttgaagtataggaatggattnttctcttctcaaaatgagctcatatttgtcttagaaaaggcttctttgaacaattatgtacagcaatttttttgtctgaattaaccaaatgatccacatgaattaacctgatatgtaatttgtcacaaccagacttatatatgattta

SEQ ID NO: 74298 - DNA, 377 bp, Oryza sativa
  unsure (1)..(377): unsure at all n locations
tatctagctctgtctcgaacgctatatatgggaaatgcacgccatgaggaggaggatgatgaccgctgcttgccgtcacccgccgcttgtgccatcaactactggagctcgacgacgagcatgactaccgatgaggagggatcctgtgagagcaagccgcgcacgtcgtcntctgtgtctgtgcgcctctacttccgcttcaagaaccctcgcctccgttggacgcctgagcttcacctcttcttttccgcgcctcgacaggctctgggccaagatcgaagccatctatcctacatattttgcttgcatatatttaaagctaatttatcatttccgtcatctgaattatgacctcctattttagcatattatttatt

SEQ ID NO: 74299 - DNA, 293 bp, Oryza sativa
ggaaaaccgaccggacctaagaccgggggatcattttttaacccccccaaatgccagaaatccccaggaatattataacaaagccgtccaattctatttttgcaaggcaaggacagtacttcaccaaataatacccctattaaaaccagcgtgccatacaagcacttaattcgcagaaccgacctaaggaaagacccctcaggacggccccaaatgactccaaaaggattcaaaccgactaaggaaaaggagggaaccagaagccaaaagatcgccataaaacatggaaaaat

SEQ ID NO: 74300 - DNA, 293 bp, Oryza sativa
agcttgattgcatcattggctgatgctagcctgcttactggtcaagtagtattagaatagctcagcttattttgttctttcttcaggtgcgttatgtttatggaaaagaaaaatccaaagtcccaatgcgctatgagatgaaactctgtcgttgagttagtcgaaagaactcgttattagatgcaaagtctggggcaatgcgttaatttcctgtttcctggttcatttcagaagagaggataactgttttggtgattggaggtggaggaatgtaacattccttctgtactcct

SEQ ID NO: 74301 - DNA, 415 bp, Oryza sativa
  unsure (1)..(415): unsure at all n locations
ttgctattactatatgatagctggatagtcgttgcatctgttattggacatgtgagtagaagcaatggttggtattgacagtgttctcatgagctgccctattgggatgtactgatgaaccgtctgaaatgatgattgaaattgaagaanaacaacgatcaaatcgggcggtggaagaagagtgaatggtatggacaatcgaggttgcgttaaactcccaagtttcgaactagtattttgcgagaatttgttcaaaactaaaaaagaaaagggctcatggngccctctcgtattcaacaccgtgcagtggccatgttcggcaggctgtggctttgcacactgatatatggagttgttgagctagcgcagtccaggttgtgcagcaacaggctcacatatattgggggcaggatct

SEQ ID NO: 74302 - DNA, 420 bp, Oryza sativa
  unsure (1)..(420): unsure at all n locations
agcttgtttttggtatantttggctggtttaatatcttagtatagatgggatcagagtattaaccgatatatcttaaatttacctcattggctaagctataaatatatataaatctttgtcttaaagtacttttaaacataagtgatttatacttgctcggctcactgtccgatctatcccaatcgcttagtttagacatatctttagagaaagattatatatcattgatatctgcagccaatcaagtagatttaattctatcttggttagtattttattgccgatctgtgtcacatcacatctggctgatatcaaatgaaacatcatcggcaacacagccgatcggctatcatttgcggacataattgttcttcttttatttcttggtggttgcatgatcaaaccagcttgcatgctca

SEQ ID NO: 74303 - DNA, 437 bp, Oryza sativa
  unsure (1)..(437): unsure at all n locations
aatgatttttaattaatctggacagaactttaatacttgtgattttgataaataaaatggtggaaaacatggattataggtttgggcctcaagtggtgcacatatggtgattagttgtataccgataaggggagagtgcgcccaaaccgacctaaggacttcactcaatgtcagntcatttcgtatacagtgcaaccacatgtgctagtataggatagcccaagcttagtaaattatttatgggttagccttacattctggtaggccggtgtgtatgagttcgtataattcagaggagcttcctatttactccgaagtggtagtttacgtgactaagcgtgtccaatacaacggtattgtgccacgtggtgggttcccattgtgtccgcaccatggcgtaagtataggcgtggacccgcacttacggtctaggcata

SEQ ID NO: 74304 - DNA, 360 bp, Oryza sativa
aacccatacacaccgtgtctacagcgaacgaatctcctatgaaacaactcacttccccgattacaaatgggaccctcattgtacagtaccacttctataccatcctaagtccataaaaacagatcgagcttaaagtttaccccaacttgaaacgctccacactctatgcacgccgcattcacgggcatgcatgaatttcacaggaaacaattcaattcccgcattaaagacgggacctcatcgttattataccactaccagttccatgactgattattggaacaaaatatctctcacttacaacacagatcagcattcagcgcatacctgactgcaatgcacgacgcaataagaatcaga

SEQ ID NO: 74305 - DNA, 431 bp, Oryza sativa
  unsure (1)..(431): unsure at all n locations
cttcagtacattgatctgacataacttttgatatgaatgagatagctagaatgcttcagcatgcagttaaacacagctgtttcaaggcgcacacagcacacagcagcagcagctacatagcattgcgttcttgatttttctggagatgcagatgcagagtaagaggatcaattgacatgttgagtatagttcatctgggtgtgtgggggtcggaaactaattatccgaaccccttcagtttagcctttgccaggtcatgggagcttttgccaagtcgttcatgtcaatggattacaaaacgaacttgaatgcaatctttcccgatcttataaaaaaaggagatataaaataaccatttgttataacaaaacccaatcgccactaaaccttgagactnttagtcaaacatctctaagtttgattaactctat

SEQ ID NO: 74306 - DNA, 413 bp, Oryza sativa
  unsure (1)..(413): unsure at all n locations
tcttgaatggagcacaaccaatgaaccctaaccgtgtacgtgatatgatcaccagcacagatggcttgccacanagctccaggctcgcgagctgcttgagcttggctcgctgtagactccgctcgagcccgattcgtcacaatttgagccgaactcaagcctaacttcaagcttgcgagcatgacgagccgagctctaatagctcgtccagcccacattttcctcttcttaaatttcaatgcaacagctagtactactcctactcccaatganaagctgtattgaaacacagagcgtgcatggctgacagtgcaggcactacctactagtctactttacttgagcactacctatagtacactacatactgcactctattaatgtctacaattgtctatatgttgaaaactcta

SEQ ID NO: 74307 - DNA, 325 bp, Oryza sativa
actcatttgtggaaaagagcgaaactgtatacaaagcccgtcaaatatactaccaatctgctgcgtgcgagaaattaggagggccaaacatgcttgcataaggccattctactcggtcacacggagatcgtcaagtattggtttcgcaagatgaatgattggcgcatatagtagacaacgaggatatttctcccctctatatggccatcgcattacgaagaggtgacattgtccaagaactgacaattagagcatcgtgtgggcctgatgtgccgtgtcgtattgtgggcccgcacggaaacaattgtacatgctgctgttctct

SEQ ID NO: 74308 - DNA, 323 bp, Oryza sativa
agcttatcttacactgggttgaattgaattggagtattggatcacattcacagcagaagctaaatccttcatctggacgagagcctttacagcagcacaaccacattacaaccacgcatgtccatttataacaactcgaacagaaaacaaaaaagtagaagccgagatcaaacctggttcttagcacgcagcatgacgagcttggcgacagtgccgaacggctgcaccacctggagcaggtcgctctgtatgcaacagaaagactccagaaaatatcagaaaaaaaatcgtacttcgacgagcagctcatgaactgaaaagcg

SEQ ID NO: 74309 - DNA, 387 bp, Oryza sativa
agctttgtatgctttggttctccaactaaacagggagacatgacaaaatattacaatcttgtgaactacaaattgcagtgttttttttactaaagaaaccggcctcacattgaaacagcccgtcactaaggatcatcatcagattcaatcactacaacaaacagccatggaagtttatcaacacgagcacatagaacaatacctttccgcactatgaggttcatcgttaaaactaaaggtttcaattgatccctgagcagcagcatcaggaatgatatctacattccccatcatttcgtctgcgtggcaactatgctgaacaacgaaagaaggaaaaacttcagatcgatcactgggagtgggacatttcagaattgatgcataact

SEQ ID NO: 74310 - DNA, 381 bp, Oryza sativa
  unsure (1)..(381): unsure at all n locations
tgtccctagcangtagcaacatagattgataaagtaaaggcaactctttactcccaactaatattgtggcagtagcaacatggattgataactctntacttccgactaatttgttgccaaagttcgaacaccaaacctgaacaagttgagtttgacctgcctgtgatggaagagtatgactcaacttctgcagcgactgaccttgcctctttagtatcaatcagagatgcttctaccacgatcgacctccgttagagccatctcagactccttcggcgcggcctaactgacgcttacccagctcggactcttcacatggctccaccgaacaacctccgtgggctctgctcttcgccgagtctacttgcgtcgcaaccgcgc

SEQ ID NO: 74311 - DNA, 253 bp, Oryza sativa
tgcattctctttaacttcaacacaacaacattgtgcggaattatacccacttcactatcttacaacctaacatttctagacctcgcgtacaactctttcgatggagaaatcccattgaaagtgcacaatatcactcaacttactgcattgctcctccagaataactctctatctggacccatccgtgaccttcacctacccaatttgagacattcataattaagcaacaataacctgagtgggccataccgct

SEQ ID NO: 74312 - DNA, 226 bp, Oryza sativa
  unsure (1)..(226): unsure at all n locations
ggcaatgccctctgctagctagctcatctgccatatattcaccatgtgctagctaaacacctaccttgattcactacaacaactanaaaaacataccttacttgacagtattccacctacacccattctagtaccatacatatgccacataccattatattatactcgccatcaatccatacatatgtcacaatgcccatccactgcttncattcatgtatatttg

SEQ ID NO: 74313 - DNA, 333 bp, Oryza sativa
ttgtttctgctagagatgtggtacagaccattttgaagctggaggatgatcgaagaatggaggtcttctttcttttgtgggtttggtggtatgcacccaataaggtgaagtccggtgacgaggtaatcagagtggaagaaatggtccataacgtgaaattgctggtctatgaatatgcctcaatgcgtaaagataaacgtccccatgtgaatgtgcaacggaataaatgggttccccctgtagatggaagaatgaagctcaactttgatggagccttctgagctgcaaacaaatccggtgggtatggattcctggttcgtgaacatcttggat

SEQ ID NO: 74314 - DNA, 326 bp, Oryza sativa
tgggtcccgtcaccggcatcgacgacctcgtcttaccacccgggcagacgtttcggttcggcagcctcgacttcgtcaccaacaacttcggcaagatctctctccttgactcggagtcggaccagtcgggagagagccggatctcagtcccgtttggattcccaaacgcggctgagagttacttcaataccatctcaaccgagtcggcttcaaaccactcggctgagatcgcatcttctccaatgtcaccagatcaagatgatggggcttacccaccgatcctgatgaagctccccgacgatttgacggtcgtctccatcacgaca

SEQ ID NO: 74315 - DNA, 234 bp, Oryza sativa
ctattccccttcttgtagataccggattactggctacctcgatgaatagaaaggcgagaatggttactagtaaccatttaccacgtgggaagtccatgacagatatgttgggaacttgcacgtctggaccggaaaatggtggcgtgagcaccttggtgagatgtctgaagcactggttaactgaaagaatattcatgaggttccatgccaggcgcaacatgagaacaccacaac

SEQ ID NO: 74316 - DNA, 417 bp, Oryza sativa
  unsure (1)..(417): unsure at all n locations
aagcttgttatcagctgcaactnccctattcttccagtgcctcagagtctcagcgtcctttcgatcttatacactctgatgtatggggacaagctccttttgtttcgaaaggtggccattcctattatgtgatctttattgatgactattcgagaattacttggatttacctcatgtcttctcgtagtcaatttctttctatttatcaaaagtttgctactatggttcacacagtacgattcttccatacaggtttttcgtgctgactctgctggtgagtacatttcggcagcccatcgtcgttttctagctgagcanggaacacttccccagttttcttgccctggtgctcatgctcaaaatggcactgctgagcgcaagcatcgtcacattcttgagactgctcgtgccctcatg

SEQ ID NO: 74317 - DNA, 378 bp, Oryza sativa
gtagtattcagatactgtgctactccgcttttatcacttaattgtagactccgtctgaaaaatgtagttccctgacagattagaatggtttgcattgcagacaagcattcagagatgagcttgatgtgctacaactaatactgcattcgaatgtcgtgcaatttttatgtgctgtaacacacagcagcccaatgatgattgtaatggaatttatgcccaacgtttgtcctataggcagtcgctttttaaatttgcattattcacatatctgatcatctttagatctgagacctatttgataaactgcaatatgagctgctgctttagatgaacttttctatgtacctggtcattcatagttctgagtgataaatgttg

SEQ ID NO: 74318 - DNA, 413 bp, Oryza sativa
  unsure (1)..(413): unsure at all n locations
ctcgtacccgggattcttataggcgactgcagcatgcgagctttttgtgtttgaannaaaaatacatgntgaaatttggtgatcattctgattttctcaacctaactcttatgcaattgcccgtatgaacctgaaggtttaatcagggcgcctgcgcctcgtttccctgttagttacaccgggccacaacttgcttagttttcatgtgagaatttgcttgcgaaaaagtgaaagtccttttactccctgcttttgcctttcattttcttgtgacgatagacaagatttttttcagtcgtgtgcttgttttggattattgcaacttttgtggataataaagccgctacttgtaagtaaacgaaaaaataatgtcggctcaacatgaacacacggtttgtggtccttcaatattc

SEQ ID NO: 74319 - DNA, 460 bp, Oryza sativa
  unsure (1)..(460): unsure at all n locations
tattatactattcattgcatgtatttgcataagctnttctcatgcttactcttctttgctcataaatccaacacatgctttnggcctgtagaatatattggcagatacctggagtggtgtcttaaatgatttgttgatgaaatatatttctttctagaaccacaagaaatacctatgttttgctttttgcaataaccacctgaacatattaagcagaataaaaatcctagttattcagggtccagattaggtcacaccaacacttatgttagccactagctagtgatgttaccgatacctaagcatgatgcgatcttcctattttattatcttttctgtaacagaacatgcttntcttatattattgtgtttctttgatcacctgcgaaagtttgttgacggtatacaatacacggaggtctgcattgttttctctaggatacgattttatatacttttt

SEQ ID NO: 74320 - DNA, 344 bp, Oryza sativa
agctttatcttatcgcgcaacaccctcctgctgtaagagttgcgccttcgcaacgaagcctaggtggcggcagccacagtgctggtggccggcggcagcttcagctccggttcctgccctctcggtggctgcatctactctggcagtgggggtggccgcactgggagtggtggctgcgcacgccagaccttcccgggcggtgggactggtggcggctgcttccctgctggccaggcccgcaccggaggcaacacgaaccgcctgaaccgtaagggaaatggtggacgctgcggctgaaatggatgatggaactgtggcggcagtgggtgtggtggtggaactcg

SEQ ID NO: 74321 - DNA, 425 bp, Oryza sativa
  unsure (1)..(425): unsure at all n locations
ctaatatatgtgcaatgcttgctctanaagttcgttaaattgaagtatccctctcatactcatgccatgtttacattctttttgcaataactgtcagtacatgcttatgaatgctcatgcttatgcgttcatactttgtatcaatcatgctttacaagctntatctctgtttttgtccgggctactgagtgcgtttacgcatgagtagtgccgaagatagcactgagacagcctgtaatctgaactctatctggagaacttgattgacgtcagacggcagtgttnggacaaccatcacttgctgactgataagatcacgtggaccgtcgtgattgtgctatcgtctctaaagaaattagaaagaaatcttatatataaaagtcatgagaaaagagtaataactcatggtctatgctttgtatcat

SEQ ID NO: 74322 - DNA, 394 bp, Oryza sativa
  unsure (1)..(394): unsure at all n locations
gcttctatcttcggaagctcgattttccttcaaagctattgtgattctatttcatgactaaacatgatgtgtgaaggtggatgacaaaggcaaaagccccttgagcctgccacggaacaccgaacacctcataggagaaacatgaacaagcttatgtcactggtgttagatgttctccaccacctagagggtgggttaaagcaaatgtagatggctcctttgttcagaactcggaagccgctagtgcaggaaangttattcgtgaccatactggctcggttctgctcaccttctggagaaatattagccactgcggatcggtggaggaggcagaagtgacagcattgctgggaaggtgtgaatctaacagtggaatgggtgaacaacctctatt

SEQ ID NO: 74323 - DNA, 429 bp, Oryza sativa
  unsure (1)..(429): unsure at all n locations
tttacctctgaaatgatttgtctggtcagcttctgctgactgttgttagactcttcctcagtggaacgggtgtacggctgtagtcccaaagcaaagcaattagatggttcttcctccgtacggtgtttatgatgatgcactgacgtggaagatcacattatcatattatagcctgatgatgcttcttcttggtattttgcttgtaactcttttggtttaacaaatgtatgttcacatcatatattaatgtgcttggtaagatgtataattgcgtatagcatactagaaatctggcttgatatgtcttgattatactgccatgtatcttttctggacactgcatgctgaanagaacatatttcatgctcagcgtgtatctatgatatctgaatggggcctaaatggtcttttgagtgtttaatgttctat

SEQ ID NO: 74324 - DNA, 392 bp, Oryza sativa
agcttcactagcttggtgataatacttagcaagtgttggtacaacatttgctaaatcgtacagactgcatatcatacaacatgtaccaagttaatgtgagtagtacaggccactaggtcctcgtaagtatagcaaattctgttgggtagagttttttttcggccttcaaaaaacattcatcaaagtcgaagtttcaccctaaactacaaagtaggtaatttttcaccctaaactttaaaaaccagacaaacttcgtcccgtgatggtttttttgtggtggttttagcaatcttaagagtagcattgctattttttcctaacttgaaattgatcacataacatatggtctggtcattttgctctttgcattccctctttcacactgtactggt

SEQ ID NO: 74325 - DNA, 248 bp, Oryza sativa
ctttccttatggttaggtcatcacggctcaaaagtatggtgtcacggaaatttgcatatgaatttggcaaagaacataacaagtaaagacctaagtcctcatcatcatacttcaacttcattgacactaggtcgggcacgatcttcttgaatacagccatgtgggtgatcaccgaattctcctccttcatcttcagagtgaacagcttcatcgtcatctgcatcttactggttagatccttggacata

SEQ ID NO: 74326 - DNA, 425 bp, Oryza sativa
agcttctattctccgggagggccccgaggcccccaagggaggagcgaaggctttggcaagtggccctgagcttgatgatcccgaggcagtccgggatccccccgggaccaccgaacaggtgcgccccgagtcaccagcctctgacagcacgaatcggtcccgccgaaaggtgcagcggcccgtctacttcgtcagcgaggcactccgagatgcgaatacccggtatccgcaggcccagaaaatgctttatgccgtcttgatggcctcgaggaagttgcgtcattacttccaagcgcatcgggttttcgtagtgacgtcataccctcttggacaagatttgtacaaccgagaaggtactggacgggtgggtaaatgggccatcgagctggctgagttcgatctgcacttcgtaccgcggcatgcga

SEQ ID NO: 74327 - DNA, 318 bp, Oryza sativa
tgaccacaaagtgacctgtggacgaaatacatatatataacggctatgtgacgtcatctagccgttactcacaagtttgaactggaaactttccaggaagttctgggcaaaagtgccaggaacttctgggcagcacttaggaaatttttgcagataaacggtgcccggaagttctggccataacctccgggtagccctctctgtcccggggagaaaatcatttttcaaagatgattccaaaaatcttttgactcatggataagactaagagcactttgtataccctagaaccacacttgaaacccctcttaatagtac

SEQ ID NO: 74328 - DNA, 302 bp, Oryza sativa
agctttttaatgcttcatccggaccacaacggatgggaccacgatgatggacgcaacaacctacaacaagcgacggctgatctcgacgaatcggggatccttaatcatcccgctcacctatctcgcaaggatatggggacgcagctttcccttcgatgcgcaaaggatactagagattgggagcacatagatccaactcgactatatcgcttatgccaaaaattatactcaaccggaataggacgtgaaaaacaatgcgtcgagaacaaaattgggaataatgggctcgaagcattgtcaaa

SEQ ID NO: 74329 - DNA, 431 bp, Oryza sativa
agctttcttcttcgttcaagtcgacacgaaagatcttcaaggggccaagtgactgcaggtcctttaaatgggaggtcttcttctcgtcatctgaaatgtaaaaccagaacagcgcttctgcttaagaagtactagagcggtgaagagtactcttaatcaggattgcaattttgtttttcacatttctatccggccaagagaccttcgagcttaaactagagttttgtttgaggtgtatggttttacctcaagggattaaattttggtatccatattttacgcacatgatgttccactagtaaatgaatattgatttgttcatacaaattgtacacaaacatgcaactaatatcctcagcctttgtccattcagtgtttgttgggacgacacattcgtgggtgttatacattcatctttagctacatgtcat

SEQ ID NO: 74330 - DNA, 378 bp, Oryza sativa
  unsure (1)..(378): unsure at all n locations
ttccttttggcactgagctttgataagtgttgtgtacgcaaatattctcaacttaatgccattttctctgagggactccaaaagtatttctgcttgaataacttttcccttccaacacagcacattaataagcaagttataagtaacaggtgtctgcacaaggccacggcataacatgatgtcatgtatgtggaaagccatctgaacgtnttctgattcacagaaaccttgtataagggtattgtangttatcgggtcagcattaatacctntgctatccatatctttgagaacattgatagcctcatcaaatctgagctgcttacaaagccctcttaacaatgacactgtaagtacatgcatttgcttgatcctctt

SEQ ID NO: 74331 - DNA, 326 bp, Oryza sativa
  unsure (1)..(326): unsure at all n locations
tggcgacacaacagcccacacatgttatcgttaccgagcttgccgcccaagcgacacaacagcttctacttcactgggatgctaccataacaccaaaagaacaagcataaacgattcctatgaaggacataagcctaaacaaccaaagaacaacctcggacacacagctagcatcaacaaccttataaagagattgcaggtgtcattgntgccgagcttcgtcgcacccctacagcgaagcagcttcgactctacccagcagtaaccaaataaaaatggtgaacacccaccgtagagccagaaacagaaaccaagacagagaaaga

SEQ ID NO: 74332 - DNA, 389 bp, Oryza sativa
  unsure (1)..(389): unsure at all n locations
actcgatggggagagaagttngatggagctcttcctttgtatcttccattctcagtatggtgtagtgcatttgtgttgatctatgctagattcggcctccttgcacttacaccaggattgcggatcccagtggatcgaccctttggaacagcttcttgccacccttcatccgacgtgtactcttcagtaaaatcatcttgaggtatacggcttaaggtgttaccttggatatcttctatcagtttctctctctgaataaacgttccattctctttgacttcagaacttttcttctcaattaatgaatggtcactattaggcggtgggctcctttgatcttcatcatcgactacttcagatggatgttcgccggacgaccttgatctata

SEQ ID NO: 74333 - DNA, 341 bp, Oryza sativa
  unsure (1)..(341): unsure at all n locations
gagaagctgactgagatggattctgcaaatattgaaacatatcatatctccaatcatcggctgatatagaagcgatttccaccttgatatccttcgtcatcggcttggaccccgatgctccctgagccaaatcattagcttcaatattttgctctcgagacacatgtgtcaaagttactagccgaaatccatacatcaattctgggcacttttcattgtagaccatcaacgtatcatgtttgcattcatactgacttgccaattgactgatcaccaacaaagaatcacccataatgtcaacagcatcagctncaacttccttgagcaactgcaatcctttg

SEQ ID NO: 74334 - DNA, 411 bp, Oryza sativa
agcttctctgtgttttggtctctgcccgaggcatcgaggccaaccccgagaagatacgagctatagagcggatgcgccccccagcaagcttagggatgtgcaatgcgtcaccagttgcatggccgccctaagtcggttcatatcgaggctgggagagaaggcgctacccttatttaagctcctcaaacgctccgggccgtttacttggacggaggaagctgaacgtgccctcactcagttgaaggcgtatctcagctcttccccagttctggtcgccccggagccaaatgaacccttgctactctacttagcggcgaccccgcaagtggttaatgccgcgttggttgtggagcgcgatgaggacaatcctcattccgcgcacccccaccctatgctggctttgccccggag

SEQ ID NO: 74335 - DNA, 431 bp, Oryza sativa
agcttggactagttcacaagagcgctgagattgcgatggttgtggaacgaatggagagatccaagccagcctttgggtgggttggaaacgccttgtgatggtgtggatagggacctcttcgccgccttaacaaagataactgtgggcgatggaaatacgacgcgcttctgggactccgcatggattaacggccaaagaccaaaagacctaatgccgttggtctatgagatctccaaaaataggaagaaatccctacggcaagggaaagaagacgactcctgggtgcatgacctgaccctcgatgcgggttcatctatcacaatcaaccttctcgatcagctagtccgcctgtgggaggcggtacggaatgtgcacttagacagcgaggagccggatcagattgttggaaattacaagcagcggcactatac

SEQ ID NO: 74336 - DNA, 398 bp, Oryza sativa
tgaaaaggtaccccattaacgacagctgctccggtctgatgctcacatttaaaccaccactttacattatatgggaagtgaactcatacacaacttgggagacgtggtagcacatgccaccccttgcatgcccacgttacccccgagaacacaaagcgtgcgacatggcgcgttcacagcaaccattcacaaagtccacccctgttggctacggtcgcatatggggagcccgcggacaattggaacgaagacttgtgattcatctctgcacttgttagcttgtaggcatggctttcacatctggtcagctggcttgggaggactactactagactaatcatattaactctacacgagtaggccccactcttacatgcatgcgatggcattgcggactc

SEQ ID NO: 74337 - DNA, 430 bp, Oryza sativa
gaacacagaccgcatatattatatgcagttgatgtcacacagaattcacaatggcttgttcataagcttataaatttcataacaaaattgagaacaaagaccgtatctatgaaaaacagttgatgtcacacagatgtcacaatggcttgttcatatgttagtgaatttcatatggaacagcataatagccaacagaaattaacagaggatgaggtctataagtagtgagtatcttaaaaacttggtggttgctagtaactacacaaatttctttgattttaggtgtcttggcaagggaatgagtggccaccacattccttaacttacttaacgtcacagaaataaacagaaatcacaaatttctttgattttaactgtccttgcagggggaatgggtgcccaccacgccccttaacttgccaaggggaat

SEQ ID NO: 74338 - DNA, 357 bp, Oryza sativa
agcttctctggttcttgatctctgcccgaggcattgaggccaaccccgagaagataccagctatatagccgatgcgcccccccaacaagcttaaggatgtgcaatgcgtcactggctgtattgccgccctaagtcggttcatatcgaggctgggagagaaggcgctacccctatttaagcttctcaaacgcttccggccgtttatctggaccgaggaggctgaacgggccctcactcagttgaaggcgtacctcagttctccctcagtcctggtcgccccggagccagatgagccgttgctactctacctggcggcaactccgcatgtggtcagcgcggcgttggtcgtggagcgcg

SEQ ID NO: 74339 - DNA, 370 bp, Oryza sativa
  unsure (1)..(370): unsure at all n locations
ctccgctccagcgcgcgaacctgcttcacgctcagccgccgcttnttntncccgccgccgccgcacgccatcatatnctcctncacgtacccctccgccttcatcccaacccctccatatccatcatctaatcaaaacacgcatgtacaattacaaaacactcaatttcccgcacatatcacactacaccatcacctccaaagaatgaattgccacaaaaggaaaaccaaagaacaaagattaccactagaattagccatcgtgacgagcgatgggctgcctccgccgccgccggcaccgncgggtcgcttcatgccgagttctagtaaaaatcagtgaacgcctggtcgatctctctctctctctcact

SEQ ID NO: 74340 - DNA, 341 bp, Oryza sativa
cggggcggcaatcaacttggaaagagatgggtctggagacaaagattatacaggctcacgcactcttataaaagagagaataccctactcctgtccggcgatgaatccgccgatgtattattgattgcgtgaatccggaaagatcaacatatgcccctagaggcgcccggacaccccttatatatttaaacgagtccgcgatacaaaagaaaaacaatattcctaacggaatatgaagataaagggaaaatacagtcgtaaccgactaagtctcacggcgattccttgatacacaaagttaagatacacacccgagatacacataagatattctatctaca

SEQ ID NO: 74341 - DNA, 388 bp, Oryza sativa
  unsure (1)..(388): unsure at all n locations
tttttggtagctaacacctactactcctcatttcccacaaacaaagactaatccacatgattaattagtagagcagtattatgtgaaagctcctgatttgaaatacaaatatataggcacaacttttatgcaccacatatagatgtattattactaaccgtccgtagccaaaatattcaaaggtcatttgactttctcgaaatcaaatactccttatcaaagtgagcaacgaagtgttgttcaactatcgaagcttgtntggtctctctaaaagtattgaagcttgatctcttggttactcaacacctactactactcctcatattcacaagcgaaactaatcctatgattaatagtggagagagacactactcactagctagcactc

SEQ ID NO: 74342 - DNA, 424 bp, Oryza sativa
atactcaagctctgattgcagcacagatgttcccttcatatgcagctgtctttgcttaactctacaaactgttacaagcatggtggcatgcaagtacttgcgaagattgcttctaaggggatagaccgaaagaagacgcaatttctagcaagtgctgccctgttgaattggttatgaatactataaggactacaggctgaaacatgatttcgttgtcgtccagttcaaggtcatagcattgttttaggtccattgctttagattctgcagcttcagcttcttttcgcagaaccctaacctcttcgctatcgtctgtttcaggtgcagcagacaattctgctctaacagcagcagcatccaacctgagtcttttgtaacttgtcatggctgagttcttttctttgagtattataagcccttcgca

SEQ ID NO: 74343 - DNA, 377 bp, Oryza sativa
tcacttcctccactggtccagccgagagaagaagagatgagcgagccgacgcgtgggcgcaacgtgtcgtcgatctccggttcccttttctcgctctctactccttccagacgcggcggccatctccattcatcactctggagctgaaaaagccgagggaggaggttttctggctctacatcgccccaaaccttgccgccggtcgtagtgacgaacaccttcgccatctccggttgagtcaaggtcacctccatctctttcgcggtcccatctctacacacaatgcccgagcatttcttttttgacctagacccctctcgtgcagtgcatcgccgggaacgcgaccacgttgactacgtcctggagcacgcaccgga

SEQ ID NO: 74344 - DNA, 410 bp, Oryza sativa
cctacgctcactaccaggagggtgatgaagactattgcgctcacacagacttagttaccgtcgctgcctgtggcaatggcgtgccgctgccttaactccgctgccttacctacttctgtttttggaatgtattccggaccgctcgcgccgatgatttaagactatgcttgcgggcttatgatgtaataattcgtactaaacactcgggtatgtgcacttagtatttcagctatgaattcgtgtgtaccagactacttgatccacggaaatggtactgtttacatgattgattcctgttataaaaacgggggtccacaccctatttatgtcaggatcattcaatcgggtatgtcatatgagttttgctgaacagaggtaatatcttgtgccgtactgcacattcagttgtc

SEQ ID NO: 74345 - DNA, 393 bp, Oryza sativa
ccatcttgtcccatggcccggattggtcctgccaccgcatccaaagccacctcaatctcaaagaccaagaaaatctttccaaatcaaggattcccaatccttccaattccttaggcccccctaagtaccgtaatggtgaaggcccggtaattaactcgaccaattttttaaaaatgggaaaactaaatggtgagaacaacgggatgtgtgcatgtaccgatgtctctctcacgcatcgctcagactggtcctttaatatttcattagagactggggggtgccttggcacgcttcttgtaccaaactggagtaaatacggtatgcctatagctgcctaatcttgttcaacgacacactaacaattcatcacattaacttatggacgatgattta

SEQ ID NO: 74346 - DNA, 248 bp, Oryza sativa
tctctattatacattattttatcatacttgagccattttgaccctagagtttatccacaggcattatgggcatttgacccacggtctaacactggagggctggcccccgcgcacaaattcttgatttggaaagaacattataggaaataatcttacacttgaattaatttgacaacataatgggagttttctactattagcgggatattggtctaaataacatttacacacttggtgggggaaaattc

SEQ ID NO: 74347 - DNA, 437 bp, Oryza sativa
tttatgcatgcttctatggtctaactctgcagctttattcctcagccgacaacttcatttgtattcattcctcatttatttattcctgtacaacgtcaaagtgcttgatgaaaccccgttgtgaataagcttgttctgcgtgggacgatacataaaataaactcaactcttttcgtttttttttctcttttggaaaggtaagcataagccagatggaccattcatgcctgacgttctgccggcgccggcagtcatagacaagggtgtcaactgcatggatgaaggcccatcgtattgtacaacaactacggttgaacgttaatgcgagtatgcaactcactaatacggtgccaacagattgaccacatccattgccttaaacgtcggcttcttgctcttgtaccttgtaaaggatctcccttttcttctctcttttc

SEQ ID NO: 74348 - DNA, 370 bp, Oryza sativa
  unsure (1)..(370): unsure at all n locations
ggtgggcggatctagtgtcacgcaatttctatccaaaattccaaacgcttacatgtgtgtgaaccctcgtccaggaatcagccgaggcacacaataacaaattgataatagagtacaaatattactctaattaataaacgaataaaatgtcattacagaggtagataggtcctctcaatcaataaagttctaagcagcggaaaataaataaacggcgcagaccgctccactccacaggcagcttgaccaaggctacacctaatcctncacaccatcaacctcatttgagaactcttcctctgatgaggattgaacgtgaagatatgacatactcagcaagcacgcagcaatatgcagtgccaggataaca

SEQ ID NO: 74349 - DNA, 423 bp, Oryza sativa
  unsure (1)..(423): unsure at all n locations
agcttagaatgtagagagacctgctgctgctgctgctgctgctggtcttgctgtgatccgccgattccagtgctcgtgatgtctgaagggccatctcagaatggagccgcatgcagctcatagccatctacaagacaaacatgccaatggagttagatggcagtgttaaaagttattgcgtttccagcttagtggattggtttctctttataaggtaaaaagaggtcctgtttttctttacagatttgccgggacagccgaaagaggtcgcccaaattgtattaagaagatagagggtgtcacgaaggttacagaatcgaccttagacagtcgagcagggtgctagccgcagctaacgcctcccaaaagaaaagaataacggtcaccttanggtgacgcctncaaanactctagacactttac

SEQ ID NO: 74350 - DNA, 247 bp, Oryza sativa
actgtgactgaagaatgagacctcctggtatatatctcaaaaaagcctttaagcctttaacggccccggatgagaagcacccattacaccctgtgctttgagcttgataaaggaggccctatacagattggagaatctacctcactttatattctaagtaacccaactttctggcatttaattgagactcgtgattatatggttaaagggcttttcccggttttggttataaaggtattttatattt

SEQ ID NO: 74351 - DNA, 443 bp, Oryza sativa
  unsure (1)..(443): unsure at all n locations
agccttttatgttgtcattccaaaaaacacataacttacacggttattctatctggaatctacaattctacataccatttatcctagntgtttctgctttgtaggtgtactataaatccacgagaaaatgaagctttggtcagatatgcattggataagtacaagtttttgtcgctcggatcacaggtaagttccatgatgtaatttgctaaattgctatggtgagggattttaattagtaatttattagatggagaacttgaaatgtaccagccaaattgtatgttttacaaattataattntgttcagtttcgttacagatatgatgactaatggattgatttgaaactgatagatctcactttagacaaagttgaaccaaattaaagtctgcacatatttaatcttgctcatgcacttctgtgacaaacatgcctttctt

SEQ ID NO: 74352 - DNA, 422 bp, Oryza sativa
  unsure (1)..(422): unsure at all n locations
cagctngactattcatacacaagcataccgactaggggtttaccccattaaggtctcatcctagaagaaacaatcggaacccgcatcactcaaagactaagactaaacctgcaaacaaaaggttatatcaacagcaagagtcagtacattaaacaagttaatatactggcaagcacaagtcaatcctaccatactacatgtaaggcatatattcaaaggaaggcaatatgtagttcattntcagcataaagcaagttgtgtttcgtaattcttttgtaaaagagttgatgcttcaattaacaaaacaaatattgagtttcaacattaaggtcatcataatttcatcataatcaatttcttggtgtcatccttcgacaacaagtcataatatatcacctcacacacaactcaacacatttatc

SEQ ID NO: 74353 - DNA, 429 bp, Oryza sativa
  unsure (1)..(429): unsure at all n locations
ctatttcgttatgtcggcgcggaagtggaaaaggcgttttgtggctcgaggcaaggaaattgcgntcactcccacgttacctaaggcaggctgcctattttcttctcggaaatttctttgcatacaatccaattgtccgactcatgtacaattgtaaacgactgtagtgcatctaaatatactctcctttaattgatctatggctgcatgtctctagttgtacatgagttgtacaactgagtctgatatttttttctcccatggaaagaaagaaagcaacacccctctctccttgtttccttctcccgtggacgcctaaatgctgccggtgaaagctggccgaggtggaggagctacatgaggtgggagttcttcttatgctaccggtcccactccctctacccacgccatcttgcctcatctcgtctc

SEQ ID NO: 74354 - DNA, 152 bp, Oryza sativa
cccgtgcgcggccccgattccgttggtactcttgttccgggctggactgcggctctttcccacgcgacgctctctatgccaacggcgcgcttctcgtcgcgcgtccgctgcgcaccgggagcgggcgccttgttctttttcgtttcggcgtc

SEQ ID NO: 74355 - DNA, 403 bp, Oryza sativa
  unsure (1)..(403): unsure at all n locations
ctatctaccaggtctgaaactttcgcgatggcagtaggagtattgaattgggattgctactactcctactttgaattaaggacacgttttaaactagatttgaactgaactaatatctcatttatcgngaatatgtntatcaaattggtaaacacgtatggtttattataaaactaagatgtttatcaaattatatttaatctgaattgtagttagtattaaaatcctatatggactctatactctanctctaatattccttaatttttaattctgacattctaatttttttcttaattggatttaatattccttattttctaattctgagtntctttttttttctaattggatttctatatggactttatactctacttctaatattcctttattttaattc

SEQ ID NO: 74356 - DNA, 439 bp, Oryza sativa
agctctttactgagtatgtcaacccgcccggcaatcatacgccggtcgatgaataccctcaaataaccgaagccgtgtgggaagaattctgctctctcaagaacacccaaaaatttaaggaatccagcgaggcacatcgcgtactgcaacaacggaatgagcacccgcatcggctgggcaccgcagggtacatctgcaaagaggcaatatgggcccaagaagatgcagccgctgcaacagcgaatgtacctgccccgttttcagacatccctgaacaaaaaagctccaactgggcgcgggcaaggggtaaggtcaacccggacggctctgtcacatttgagaacaaaagtgatgccgtcgtctatcaggaactggtgagttcactacttaacctaactaatttcccgtcgtataaagtacaagttcgtataaacgacta

SEQ ID NO: 74357 - DNA, 295 bp, Oryza sativa
  unsure (1)..(295): unsure at all n locations
ccgcaaggaagagaacccgtgcaccacctcgtctcctgtnggctttaaatactcgggtggggggagacgctgtgcctgattgtgctgaacccgtcatccatgtcttaagcgatgaggaagaagaggaagacttantagaaagagagctagcttctccagaggaagaagatccgtcttctctttccaacgccaagggggattagttgcctaattggaccgtgccgtaatacgctggttagtatgcttgcttaagttgcttgtggggcgtgggtttagcctgtgcttacatcattgg

SEQ ID NO: 74358 - DNA, 330 bp, Oryza sativa
ctagctcttgcatgagagccaacacccttaactttttggtacatctcttctccacataagtttataataagcttatagctaactattttacttgctctgagcctagctataagataggagtagcacgcagtagctactggaggactcctccggtaaaaaataagacaaactctatatttccgagtccaacggttaaatgtccgacttatttgaaacaaataaacagataagtcacgcataaagtattaatcatggtttatcctctgacaacaataaaaatactaattataaaaaaatgtcatataaaacggacagtcaaatattggatac

SEQ ID NO: 74359 - DNA, 402 bp, Oryza sativa
  unsure (1)..(402): unsure at all n locations
tatgttgatgatgtagtcggtaagaccaatctgaaggatgatctgatcgcggatttagaagaaacttttgcaagcattcgtgctttcaagatgaaactaaaccctgaaaagtgcatcttcggagtaccgtcagggaagttgctcagatttatagtatctcaaagaggcatacaggccaacccggggaaaattaacgccatcctcaacatgaaaccgccaagctcccaaaaagatgtccaaaagctgattggttgcatggcggcgctcagccggttcgtctcatgactcggcgagcgggggataccctttttcaagctgctgaagaanaccgataatttccagtggggacccgaagcacaaaaagcctttgaagacttcaagaaacttctcactactccacca

SEQ ID NO: 74360 - DNA, 413 bp, Oryza sativa
  unsure (1)..(413): unsure at all n locations
gttctccaaattcttggccagccctaacgaaccttagagaattttggcatagtattttaaaaaatcattgacacgtggagcctaattagctggaacaaaatattcaaaatattaccacaaccacgggtggcaccaagttggataaggtcatcaaaattaactatcgtccttatacatgaaaaaatgtggcaagatatgatcgggaacacaaaccaacccatactttcactanatcctttatttggatgcacgcctcaatattaggcttagttttatatattgaagttcttgactcaactctctcggcgtgtgcacacttttcaactaactagcgcgtgttttttaagaaatctatgaagctgcttaaaattattaatctagtttcacaacatactaatctactccatattaat

SEQ ID NO: 74361 - DNA, 360 bp, Oryza sativa
aaatacacccaccttactactgtccaactctgatcggaagcattaataacattggatgataataggacacagtaacatctctctaactacacatgcgagaagatactaactgctgccggtcactggatattaatagagctcaccattttacctggcgccctatttcaacgagggcacacctatgattaataatgcacgatctcacgattaaaatattaagattattcttgggcacctactacacctttatcaatgattaacgttttattcacactagggttgacatcattgcgctaactgatggtatattgctgctgatatgacaatcagtgaatcccatcatatacttcttaatggcgt

SEQ ID NO: 74362 - DNA, 413 bp, Oryza sativa
gcttatttgcatatgggcaggtgattaattctcatatcttctggttcttgtaaggcgtcaggagcatgcctaataatcttctatagcaatgacactggcaatgttaacattggacctgtaacatctcaaatttagccttgatatgccattttatttaaatctctgcaggaagtggccttatagaatggactgattctagttgacacaaagcatgagtttggaaaaacagctgatgggacaatcatgttgattgatgaggttacatcttcttacatgagtctatccttgagatatgttctgccttcatatttatgcctgacggtctcacgaaacaaaaagagcatggctgatccaaccttagattactatgcctgaatagcaacttgtgctagctgtgctcactgtttctctct

SEQ ID NO: 74363 - DNA, 437 bp, Oryza sativa
  unsure (1)..(437): unsure at all n locations
agcttgtattttttgtcattaatctttgtagcactttgaaaggaccatcagctctaggtagcaacttagattttctcaaattaaggaacctatcctttctcaaatgcaaccaaaccaaatcaccaggttcaaaagcaacatgtttctttcctttgctcccagcaagtttatatttaatattcatgcgctctatgttctccttagtggtctcatgcangtttaacatcaattcagcgcgatattttgcatcaaagttcactctctctgaagttgggtggggcaaaagatcaattggagcacggngtagaaggccataaacaatctcaaaagggcacttcttagtagtagaatggtgtgaacgattataagcaaactcaacatgaggcaaacattctttccacattntaatattctttntcaaaacagccctaagcatt

SEQ ID NO: 74364 - DNA, 420 bp, Oryza sativa
  unsure (1)..(420): unsure at all n locations
aaacaacgcacgcacatgtgccaatatcggcattaattgacaaaagttcgccgcgcgagccacgaagtgagtttttgccgcgaacgcacccaatacactctaatatgtgcaaaaatcatgtttttggcgcttttctaactttatcattccggtatataacgtcgcacctacgtgtgccaatatcggcattaattgacaanagttcgtctgacgagtcacggagtgagtttttgtcacgaacacacgcgataccctacaatatgtcagaaaatcaagtttttctccttttagaacttcttcattgcgggtataaaacaacgcacgcacgtgtgccaatatcggcattaattgacaaaagttctccgcgcgagtcacgaagtgcgtttttgcctcgaacacacncaatacactccaatatgt

SEQ ID NO: 74365 - DNA, 424 bp, Oryza sativa
  unsure (1)..(424): unsure at all n locations
gatgacatcagtttacggtgtcacatatattggtgctcgtcaacagataacaaaaagactaccagagaaagggctcattacagatgacaaattgttgtatgaagtgtcctgctatgctaccaaggtaaatgctatacttgcatttgacctccactgatgtttttttggggtgtctccttattgattgctttagtaagacaagggcatgctttgactattcattctctgatgaaggtaactntggatgcattatgacaaatgttccagtctgcccgtggtataatggcatggcttggtgattgtgcaaaggtactagttttccacacctaaatgaatatattttctcagcttctttaaattttgacttaagacatctagtttntgcggcactntaacttatccttttacaaagcttctctagagc

SEQ ID NO: 74366 - DNA, 332 bp, Oryza sativa
  unsure (1)..(332): unsure at all n locations
agagagaatctagcattagnttctgcaggaaatcctggacgttgtctacgaagagttaagcacctttatgccggaatggagggttcatgttatcaattttatttcagataatgatgtaatcatggtactattatagctacttctgacggattcttagttaccagcttaccaccattgacttctagttaatctgagaacagattagcagcatcttgtgatgtgaatatgccacaatcaccctacatatattcacctgagtcctgaacaatctccatatatatggaaaactaatgattttatagacatatgtgtactatatattntatcatcag

SEQ ID NO: 74367 - DNA, 442 bp, Oryza sativa
  unsure (1)..(442): unsure at all n locations
agctttcttattattcttttntctctcaatataaccattattaattaaagctagatacatcgacctaacagaaaatattccattctgatgataattccatctaaagctatcagaggattgattcaattgaatatgtacaatagaagcacacaattcgtgccaatatgcaagattctgaccaactaatgatcttctaaaggaaacattgagtggaacagatctcataacattagcaatagtagaacttttccttcggacaatagagtataaagatgtatatttgtctttaagagccaagtttcctagccatttatcttcccagaacgcttatttgttcccattatttacaatccacaaacccatatctaagaaggtatcttcgaccttcatgagacctgaccaaaaatgagaatncgcctggttcttattaacttgggttata

SEQ ID NO: 74368 - DNA, 245 bp, Oryza sativa
cgtcgatgatgccaccgtgtcgaacaccttatgcgcgacactagaacactgcacaccctgtagttcttttcccaacctaacttgaatttatcaatcacctctgaaaaatatctgtgtcaaagcaagagaaaccctagtaaataaatgcagataatacacggaattcggggtgggatttttcttgaggtctacatgtagaaatatgcttgcaagattcttaggggaagtttcagagctctagaaaa

SEQ ID NO: 74369 - DNA, 206 bp, Oryza sativa
  unsure (1)..(206): unsure at all n locations
ataacttgtggatccgctaaataacccttttctctctctttctggctgagaaagaacatcatgttagctgacagaaggagacattgccagaaaccaaagaatggaaaagaacagaatgcctcaaccaaatcaccggatacatagcccaattgccgagaaccacaacccgaggccgcaagaaccagatgctntataaattggcagaa

SEQ ID NO: 74370 - DNA, 434 bp, Oryza sativa
  unsure (1)..(434): unsure at all n locations
gctgctacgaagaataataataataatattgtggtttgatcttttatcattacaaatgctcaggaaagctgatatgatttgcagtatagtgcgcctaanattaattaacaatcaattacaaatgcagtcaattgccaagaatgattcacaattagcattatctgttgtaggtactggttacttcagacaagggtggtgatgatccattcaagtaatttcagtccagctcggtacatggtgaacatttctttattcaaattaaagcaaagacacaatacaaaacatactgtttaataatgcacagtataatagcacgggtcaataatacatcataagtatttttaggaatttagacccatcggtattgcatagcgcgggagcagccaacccacccttatacacattaaatgtagctgcaactacgatgcgagctg

SEQ ID NO: 74371 - DNA, 312 bp, Oryza sativa
acttgcacattccctttccaccgatgttttagttcattacctatcatgttccttgtgattgaataaccggttgatttaatttgatacctggtgataccagtacctgaaggtataacctaatgcaccggaacaaagctctttttagtggattcgagtaaggaaataaactgctcggtagctgaaaatttatataaataaggctgaattcaaggaggagtcgggaagaccacatcaggatgggctcatattttcttaggatctctcttaaataaagaggattagcttttttttctaggtatgaaatcttatctc

SEQ ID NO: 74372 - DNA, 437 bp, Oryza sativa
  unsure (1)..(437): unsure at all n locations
agcttctatgcttgtactacgaaagcttacaagctttcgtgtttgccattntatcttatcaagattcaataaggtaggggtaacaaactaaacggcctccgtatccaaccaaaatttagcatggttaaatttgatatcaaaccaaactgctctacatatggaatttgtaccaaagcattacgctcaactctacaaaatctaccaaagatacacgcgccctttttgtttgaagaaaaagctaatagagctaaccaagtttttgtggcatgagaaccacgtgaggcaactgctacactcaagtacttggatttctaagaggtagatatttcttttttggctactgaagaaactgactgcataatctttctctggatgctcgaatataatgtagttcaatgtgaaatcgacatggcacacgccattgttaacctagttgg

SEQ ID NO: 74373 - DNA, 357 bp, Oryza sativa
  unsure (1)..(357): unsure at all n locations
tccatttctatgcatatttgcagcttattcatacttgaaacttcacttttgatattgatatgtatcatttgtgctttggggagcatatgaaaggggggtttgttgaattcttatcgtaaaaccgcataattagttcagagctatgttcagtggaaaaagaagtagacatgattgcttttatgcttcataatcgcatgcacaagtttccatgaccaattttaggtactcttctgatgcaggttcttaagagtggacatttactgctctcatctaaaggtacgatttgcagtaatatctgtaacgggtgcatggattctgttnttagcattaatagatactccctccgtcccataatat

SEQ ID NO: 74374 - DNA, 433 bp, Oryza sativa
  unsure (1)..(433): unsure at all n locations
agcttgttatattgacaaactatgaaataacctggtcgccttctgctgtcatccttgcctgtcttcagacgccaacactgcagcaatatcagctaaggtcttctctttggttgattccattatttcccctcgctttgattgatggcgcaaaattgaaggtgctagcaacaaattttggtacctcacaccccatcagcaactaagttgcttgaccatttctttgttgctgctgctctttgctcgaccttcctggccaaagaanagctattttcttttgcaaccattcttagctaaatccttggcacattgacattcttacatcatcctgatgacttctcttggctcttgcagcttcagatgatagacgtgcttgcttgccaccaaaaaggagaaatgcaagcatatgattcatgagacagcctgagctcaattg

SEQ ID NO: 74375 - DNA, 323 bp, Oryza sativa
  unsure (1)..(323): unsure at all n locations
agagatcatcccatcagaaagcttcgattctgatcacagcgcggctaatcctggcagcggcagcaaagaacaantcaaaaaggacggcttgaaattacttgcagggctcagcagtgagctctccaacgtgaaaaaagcggccacactggagatggacacactgagcggcaacatcctgaggctcgtagccgatctcgagaatgtgaagcttgtcctacagctcaaggagacatgctcaaatcaaggcgcgagcgagaacttcnttcaggcaatggttgtcttcctctgaagagccgaggcagagatcaagaacatgaaaaccg

SEQ ID NO: 74376 - DNA, 270 bp, Oryza sativa
gctggtaaaaggaaaaagagaatttatcgtcttgttttaatcatgatgatatccttgcccgcgaggtgtgagaatgcttaacaattcactacacattatagaatgcaatgctataaaagtctgaaggaaacaaaagaaatgtgagagatatatttatggcggaattggtctgccaataatttgagcctagatactccgaccaaataacccacatttcttatatgccacccgaaacttattaaaaatctcattgacatgtacgcccacaca

SEQ ID NO: 74377 - DNA, 336 bp, Oryza sativa
tcaactatttatcacaaaggtggatgctctttatgaaatcataaaagcaatcctggaaacaaagaattcatgtttttttatgcatattagtagctgcaagcttcttcaacaccaggtacctatcgatctcttgcgagatgcgccgcaagtttcgctcggcaccttcgagcgtctgcttgcggatgctgacactgagagcctcaatgcagacattatcgatgttgtgcgcctcgtcgaagacgacgacgcactccttctgcatctccctggacacaatgctggccaccttgggatcaatcaggtactggtagctgtagaccacgacattggcgtact

SEQ ID NO: 74378 - DNA, 366 bp, Oryza sativa
ttattctagcttgtataatgtgaaattaaatcccacgaacatgcacccatattctggctcattcattcatatgtttacttctcttttcttattagttcagctaccttcctacaaaagggaattggaggaaattgacacttgaaaagaagcttatgggcactcatatgcacatcatacaatcccgattatcattcaaaggaagtggatacggaagcgatctccttggtttgatgcttgaggcttgcattgcaacagatcagggaagggagcaacatcagctcggctcaagcatcgatgagaacatacatgagtgcaaaacattcttctttgctggtcatgataccacgtcacttcttcttacctgga

SEQ ID NO: 74379 - DNA, 342 bp, Oryza sativa
  unsure (1)..(342): unsure at all n locations
ctgttaggttgttaaatgaatgttattgtatagattatggaattgaatgctcgggtntaaacttcagaatgctagatggactttcaaactaattatagggagttattttgactttttttttctattttaaaataggagggagtattaaaacaacgtactcacgtgtattcccagtacgccattctatcaaagttgtatcaatttttacagntgtatgtatatcttatattgtgaagtgtcctatgaaagatactttatcaacactttgatccatttcggatctattatgtagactagcctagatctatgaaaacattgccaaaattgtctgcctagcaactt

SEQ ID NO: 74380 - DNA, 315 bp, Oryza sativa
  unsure (1)..(315): unsure at all n locations
agctnggtgtggccacttggtgtccagcgtatcgttcgatgtgtgtgattcatgcaaaaacgcaatgaactctgtacctcgcgccacatgacgctatttatgaatgtatacggcctcctcggagtattaacaacctgcatccagtggtttacgtgtgcaagctacacgttcaaaaaaactagtactactagtagtagcgtatgtttcggcgtgtaagctatgacaaaaacagagaaatttcggtgtgtttacgtgtctgtatagaaaaattaaactcgtgcaatcgatcattgattctttccaactagcagccta

SEQ ID NO: 74381 - DNA, 409 bp, Oryza sativa
  unsure (1)..(409): unsure at all n locations
tggcagccactaccgggagacagggcatcctgctgctgccatcgacanaccgcaccatctgtacccaatcgaacaccctaagtatcaacgactgcgggcagcagcagctactctgattacgcacatccgccgacgccgacgccttgctcttctacttcaagccagactccagcgcagcctccacgaagtccataaaccagcacgacgccttacattgcaactgcttcgccagcccacaacgacgacccgagagcaccggtggtagactaccagaagaacatcgctctcagcgccgtcttctccgatctgctagtacaacgcacttctgctgcgtcggagcccggacttgacgcgccgtatccaacgtgccggcgcaacgaaccgacttgacacaccaggctccttcctc

SEQ ID NO: 74382 - DNA, 354 bp, Oryza sativa
  unsure (1)..(354): unsure at all n locations
aaaatggaagaccactatcaaataatttctttttattctaaaaacatgacgcctagcttaacttgttttcctaaggcaacgagacaactctatattatgcatgtatgacggaattggattttttttttcattttttagtgtctcttgaccatggatttgcttggttgcgtaggcttgtttttttaacggctcacatcaaacagtgcaaagtttatattgatagagtagaaaaaattattagattacaatcataggaggtcataacccagaaaaaaataaagaaagaatcgtcattgtaacattccatcatgcacctangtgcacatcacagtacacatgtatatatagtggttg

SEQ ID NO: 74383 - DNA, 460 bp, Oryza sativa
  unsure (1)..(460): unsure at all n locations
gtcttaaatctcaccatacacttctgcagaagtattttactatttcccctttacctattcggttacttgtagcacaataataaaatttaggactaatagcacaatcacaaattaattaactggtggctcgacaattcttaatttctctttatgaacatccataanagctctcatattcgntgctaattgtcactcaaactggttagtgctctgttgacacataccattatcagtgttagaattatggttgtcatatcttgacaataatgaatggcatagtgaaggcatcatttccatgtactaaatattccaatctattttatttacaatattagttaacacaaaatttgctagaattggttattctgtcctaatggtagctagtgacaaaatgataaatcgacattgatattcgtaactcattcaccatttgcatttcagattccatgaattacaaact

SEQ ID NO: 74384 - DNA, 464 bp, Oryza sativa
  unsure (1)..(464): unsure at all n locations
tatagatcggcggagaggaagaagtgagaaagcaagactcaaagtgaatctcttatcaacacaagataagcaatggagccaactagcttgaggttggagggtanggacggcaattttacccacgggtctgggtatccacgggtatctgtggatacatggcccgatgggcacgggcatgggtgtaatattttgcccgtggccacgcccactcgagacctgagaacgtagcagacagttgtcgagtattattttttacccgtaggtaactcatgcccgacccggtacctatgtattagctaatttttgcctacctagccatctcttaattctcacaccctttctcttggctcatttggctcgttaactagggacacatatatactcaactaataaaccctaacctaattccccattcccctctcctacccccatacccacagcggaggccggcagtggcactgatg

SEQ ID NO: 74385 - DNA, 441 bp, Oryza sativa
  unsure (1)..(441): unsure at all n locations
agcttctttttatactgttgtccacttaaacttggtgtgcttcttcactaggttgaagaaaggaagcctaactttctcatgctggctacgaaccgaccgagtgctttcatgcatccggtaagtttttcaacctcctcaagccttaatggcgacttcaagttcttgatagccctgatcttttctagattggnttctattccctatccagagactagaaatccatgtagttgttgatatttcttacgatcatagataaatccgtaagcgcatggaatacccgtgtagcacttccccttaaagtattccaatggtaccgaacacgaggaacgtgtgtgtattatctgcgatcaggattcgatccaagaacaacaacctaggataaattggctatagagaattcctatggtctttattgagtctaatacgttataagtaaaactc

SEQ ID NO: 74386 - DNA, 434 bp, Oryza sativa
  unsure (1)..(434): unsure at all n locations
gcctagcgtgcaaagtagagagctcaacggagagaatttattgaatctctggaaatgctntccccctagcctctcgtaccacgtggggtcgcatactaagcaagccaaaggcaagaagagtaagaatcagaagagaaaagcaccgatgcgaactgaagaagaagtacgtaagatgactattaccagcaccgaatggcctccagcagggataactattcctagacgttagagaggaaatactttccgaggtgcacgacagttgacccagcacctcctaagccatggcggcagagtatctgatagtgaagggtcagatcaagtctcctcggattatgaagatgagtctctccgacgtctcggcgaggaagagatggaatcaaaagcatgcccccgttgtggagaaattggacacattgctagcatgtgtctcacac

SEQ ID NO: 74387 - DNA, 363 bp, Oryza sativa
ccctaagtgaggtgtggcgcggcatgcgtccagcaagctgcgtgcgtgggcacgtggtggtcggtctggcccgtgctaactgggccgcgtaggaaaaaaagaggagggagtggactgggccggcttactgatgggctgaaaaataaaaagataagagagagaatgctatcccggcctgagaaagaaggcgaagaggaccatgaataatgctactttattaataactagtgaggcacgtcgacatatattgaccatatacattcactggctaaatcaatcatgaggggtagtatgtgggaacataaatcattaaaaactatgttctggtaatgtttcttattggataaatcattctgaagatgt

SEQ ID NO: 74388 - DNA, 452 bp, Oryza sativa
  unsure (1)..(452): unsure at all n locations
cctgatcaagcatggtcagatatggcatgagatatgttagctcgcttctggttacaagaatgagatttcagttaatataaggtggaaatagaaagcacaagagaagtagaatattacaatttagcatgtaagtaacatttttcagattacaaaattattatgcagttccacacaggtgctagctcttcctattcagaccctacatcatgtcagagcgtacacatgctgcagaccttaataagaacaaagttgtcaccacaaacctatcaaaattactattattatatgataaaactccataataaaagataaagtttggaacaagaatttgaaattgaggggattatatgaaaggaacagatctgcaggatggaaaatcaaggatctaactgaatatgtaacagaatacacatccaatacatggatattcaaatggctggatcaaanaactt

SEQ ID NO: 74389 - DNA, 405 bp, Oryza sativa
  unsure (1)..(405): unsure at all n locations
tggcgcatgagagatgctggatgatactgttgctgctgcatcggtataccagaccagagcaaaattcccaatgcatcttcctttctactaccatcatcctatcctatccctacattntactagtaccttaccttctncccttccttcctgacaaactgaaaagctagcctctatacattcagaccgttgttcacggggacgagaccagccagtggttggtgtacgccactctctctctatctctctgcatatctgccaacaaatctgtacagctgtggttataaaacttaaaaactgttcatccaagaaaattgctccccttcaagatggaaaaccataaggagggagtacatttgagaatttcaatactgatcatatatanaccactcaccttacataacaatc

SEQ ID NO: 74390 - DNA, 436 bp, Oryza sativa
gcttattttaatcatgctggagataacattaatgggcgtcaacggaattgcttcagcaacactactactggtcccagcagcactattcatgtaaagtccgtttatgtaattcaccacattacatagcgccctacaatatttaaacaagtatataatatgttaataaatgagcttacgtatgatttatattgttctagttgatttcaacagaatcatacctgaaagatttaaaaccaatatttgaaaaaccatatatgaaagagtcctcgacagagaacatgaattctctgtctttagagccaagagatgcctcaacttcctctagtaccaggtatgcactagcgtcgttcgagggaatctttcagacacctatgggtttcagcacgttggggtggtcacattggcacaaaatgcggaatctcgtgtttgcttcctc

SEQ ID NO: 74391 - DNA, 460 bp, Oryza sativa
  unsure (1)..(460): unsure at all n locations
tcggatgtgcatcgactacaccgaccttatctaggcatgttctatgatccttaccccctgcctcgcatagatcagattgtcgactccactgcggngtgcgaccttttgtgttttctagatacatactctggttaccatcagattcgcatggctagggaggatgaggaaaaaactgcgttcattacccccataggaacctattgttatacgacaatgcccttcgggttaaagaatgcaggtcctacttttcaacgtactactcgaatttctttgggtagccaattaggacgtaatgttgaggcttatgtcgatgacttggttgtaaagacgcgcaaccaggaaacattactcacagatctagcggaaacttttgcgagtctccgctccgcccgcataaaactaaaccccgataagtgtgtgttcggtgtaccttgcgggcaagcttctcggttcttggtct

SEQ ID NO: 74392 - DNA, 409 bp, Oryza sativa
  unsure (1)..(409): unsure at all n locations
tgcagacatcaagtcaacagatggtagaacgacattgcttttcttctgggntaaagagatcatccgatcagaaggcttcgattctgatcagagcgcgggtaatcctggcagcggcagcaaggaacagttcataagggacggcttgaaattacttgcagggctcagcagtgagctctccaacgtgaagagagcggccacactggagatggacacactgagcggcaacatcctgaggctcgaagccgatctcgagaaggtgaagcttgtcctacagctcaaggagacttgctcagatcaaggcgcgagcgagaacttcttccaagcaatggttgtcttcctcagaagagcagaggcagagatcaagaacatgaaaaccgcagatgagaacgcgttgcgcctcgtgaacgag

SEQ ID NO: 74393 - DNA, 283 bp, Oryza sativa
agcttcttgtgatctatagcaccttgttaaattcagtaatcatgatgcaatctctcgatgtgctaatatatacatgatcagaggattcagataaacttcttgtgatcctaactctcgcaatggacttactaatatatatgtatgttcggagatattcagtcgaaaattattttcaataggtgtagggcttgacgaacatactctctgtggactgaggatgactctccgtttgtggtgtacttgccgagctgagccagcgagttcttcctgcgcctgcgggacg

SEQ ID NO: 74394 - DNA, 479 bp, Oryza sativa
  unsure (1)..(479): unsure at all n locations
ttacggacacatagaaactcaagcttccgnggagtgcaggggcgagcaaggcgagtgatatatattgcttccatgcatggangtgagcgaaggggcatgttccacctaacaagaaggtcagacatgcaagctagccgcatataagataaactattttaagtttgattatacgtatagacagatattacaatattgttaatactaaattagttctatcaagacaataattgaatatattttcataatagagatatcatggattaaaaatgttaccattttatctacagacttaaagcactttgactttaactaaagttaaaaaggctcgtgacctgaaacgaacgaaatcgctaataacctagagcatatgcgtgtaactcattagactatgtacgataatataatacacgtgaagtgcatgtatgtatgattaagatcctacgacttactttgctcatacaccggtcactgatatatgt

SEQ ID NO: 74395 - DNA, 423 bp, Oryza sativa
agcttcttaactatttatgcataagcttactctagtattaaactaagagaatgcttataaaggtaattgttggcggatggcatgaggcccttcaaccaaacctgccgaaacccatggcgaatgctatggagcaagaacggcgcaaggcgaagagtagcgccaggctagaggcgtctcaggcgaagggtgcaaggcgaagactgtctgccgaaggaggatgacttcgccttgacaagttcgcccccgcgagagccgaggaagcctttccggcccatgaggccggcgatcgccagacggcccatcaggggcccatgagcccctataacattatgtacccctgtaaatggtcctattgtaagggtaatcatgtaaattcccctctacaacctaaaccctggtagtaagaacttgtaatggcgctat

SEQ ID NO: 74396 - DNA, 342 bp, Oryza sativa
gatcccgaaacaatgaccgccgtcaccgattggaagccacccacgacagtcactcaagttcgcagattcttatgtttggcaggatactaccggagattcatcgagaacttctccaaaatcgctcgacccatgacacagttgttgaagaaagaagagaaatttgtggggagcccgcaatgcgagaaggcgtttaaactctaaggaaaagctggtttcctcgccagtgttaatcttgccggatactcgcaaggacttcatggcgattgggatgcttcccgccaggattggggtgcgtgctcatgcaagacggtcatgtggaagcctatgcctcacgtcagctat

SEQ ID NO: 74397 - DNA, 345 bp, Oryza sativa
tgttttctagcttataccctcttaacggttcctcaaaaatgacaatattattggtggccttttgggatgtatagcgggtgcaacaccttttacttattgcgagttgccaatgggtaaaacaaaatggaggattgtatattttgcacctttggtggacagaatagacggatggctgacagcgatgtttctacctttcggagggagactaactttcatcatttcagtcctatcaacaaacccaaactattttatgtgttcttctaagctcccactcttagtcattgaaacaattcatacagtaatgataaattgtctaagaaggggaaatagtgcttcttcagaaag

SEQ ID NO: 74398 - DNA, 402 bp, Oryza sativa
ccttaaaactcagctgagccgccaccacccttctattgttgtctggtctacaagcacggttgatacaataaagataccatcctacctctatattccttttgatccacagcttcaccatcttcatcaggatctatcacagctgtagaaccaattggtggtgaaattggcttggcattcttcatctttgaccggctcaaaagatcattcggatacttcggttgatgcacaaaagtaccttgaggtgtttgcttaatttgcaatcccaaaaagtacgataactcacccatcatgctcatctcaaattccttgcgcatagtctcagcaaaatctacaaccaaagcgtgagtcgaacaaccaaagatgatatcatccacatatatctgtacgaaaaggtgattatca

SEQ ID NO: 74399 - DNA, 446 bp, Oryza sativa
  unsure (1)..(446): unsure at all n locations
gaagcttgttcttttaatctccatgagagagagactggagacgatttattcaacaactattgtgctacggagatattccctctcaaactctccaaccattttcaatctcctctgaaccaaacaagggctaacccgaaggaacagaatagaatgacggcggctgtttgctgcctgtgactgcagttctatgacgtcgacgaggacgctcggtcgtcgtcacaacagaatcatgccacattgccactgcaccactgctgctctntgcctttttcgtagcacgagctggcttaagatactgtttgcgcaaattgagatttgagtactaagagcacgtacatagcagactcttagccagctgtaaatatattttaatgagataaatgatgagacataagagcagcgggctacagatctgtagccagctgcagcacggactccaagacaca

SEQ ID NO: 74400 - DNA, 390 bp, Oryza sativa
  unsure (1)..(390): unsure at all n locations
agcttattattttgctcttaacttgtgcaaagtacatttttaccctggcctcaaattaaatgattgtttctcatcctaactttcagaaccggataaataacactttgaaacatggcgttttagtggttttggttgaaataggaggttatttttctaatttatattcttactatatatgtttaaggtccaaaactatgaaacatacctaattgaagtttgtattagcaaaaccaaaaaaccactaccgtattgatcaaagccactgtgagaagtggttcggggcgtcatatgtctggttttcatattttacaatgaanaactacatcgtttgtagttcagaaacgttaccctatttggtcttttanagttcaaggtagacaaacatacatg

SEQ ID NO: 74401 - DNA, 436 bp, Oryza sativa
agcttgttttctttcttatgtctattgcgcaattttggtgtaacaatcattatggaaagattaccacgattttttacttttcttaacctttcatctatacgcctctcagtgaggaagaagttcaatgctgatggaagatggttcatctctgtgcttgagaaatcattaagattaaaccgtgcaagcttaatcaacttatctttgtcccaactagcaaagttatctatatgactaaatgcagccatacaaaggagcatatctgtgtttacctcatcaaaccgctcattaagctcttgtagttgtctatcaatgacacttagaaacatgtcaacatggaagcgatgcatattcttgattataatcaagaacctactatctcttccaaccggccgatagaaagagtccatatcacggatcttgatcttatgcttcacac

SEQ ID NO: 74402 - DNA, 456 bp, Oryza sativa
  unsure (1)..(456): unsure at all n locations
actcagctagactgattaatgctgagttagattaggggatggttcatatggcgtaatttttcttgacctgcgttttgaacaccatctctcctgcctagctccgtccccgctacacggggagagcactgtagttttgcttatgcttatgaactanaacttagagttgattttatgttttttttccatcgtagttatttcacaatatttatttttaatcaataatgatgtgtatataaaaattctacttataaattatgttttggtaataaattgtacagataaacatatgcataagcgaaacaatgggcgagttggacaagcaacagaaactgcttggggtacttccgagttcccacttccaaatttctacgacagcaaaagcctcttctanaatacataagggcttggttctttccttcaactctaaatatcaactttcttattttccgttaacat

SEQ ID NO: 74403 - DNA, 440 bp, Oryza sativa
agcttgtttctatcgtcatagccgatattaatcagcagattgctcttcagcgtgctgcccgctaaaaaggcgtcgtccacgtgttgacggtcaaagcccgacatcgggccggtattcagtcccagcgccccgcaggcgacgatcagataagccgcctgcatggaactgttgcgaaacgctgtttcttcggcaagttgtgggctggaggtaaaccaactgcgggcatcaccgtggggaaacagtagtggtaaccgttcataaaattcactgtcccatgcgacgatagcggtgaccggcgcggtccaaggtttttgcagattgccgctggaaagtgcccggcgcagacgttctttttcttctgccgtgcgggtaaacacgatccgtgccggagaacagttagctgatgtcggccccatttcatagggcataatcttccgaac

SEQ ID NO: 74404 - DNA, 381 bp, Oryza sativa
atccaatggccaacagcaagaacattcttccatgggacggccggagtgaggagaccttgacaaacttaatatgcgttggttacaatgaactcacgccatgattctcctagccaagtagagaccgacacgcaagtccgaattgtcatatatatgttacaacaaatatgcgacatgcatgagaatgcacctaaaacatcatctactgctggccactaacgatgatggggcgtaactcgcgcacccaaaatattactcaggactccctccgattcatattataggacaccggtgactttttattatatgctggaccgctcgccctatagaacttctgtgagacatggtagaatatacgtatgcatacaagatatttaataatga

SEQ ID NO: 74405 - DNA, 366 bp, Oryza sativa
acctgaaacagtccttgtatgaaaacttatacaaattcttatcctaatgaagagaatatggcgtcaatctcaagccatattcaaaaccctagaaaagcgggtggcgcacttggacactctggaagatgttcaaaaacaactataggatgccaaggatgcaactaaagctcgagaggcctagttgctgacagaaatgaacaacttgagagatgccaacttggagcttcatggaacactcggaggtaagtgtaatgccctagaaaagaataatatcgtagaagatattttggaagtccatatgtatctggtgtttgaaaatacacaaacaaccttatgtatactctagttgggctagcttctggctag

SEQ ID NO: 74406 - DNA, 369 bp, Oryza sativa
actcgaccgggatcttaagcgactgagctgcagttttataaaggatggattgatgacttcaaggacagtcaaactattgacaagaatctatcagctaacttaactcaaaaagtcaaactcaaactctacaggtgcaacaagggacctcctaaattgcgatgaatgacaagcgtgaccgactgctcgccgagatggcacgacggttttctgcacatgtttaaagtgaacctgacatgatgaacctcagtaagctgacgacatcatgagtctacagcatgacccatatcaagggttatgaagacaagatgtgaatcatctagcatgcaatcaacaacttaacgtctcacgccctgtggactattccataac

SEQ ID NO: 74407 - DNA, 450 bp, Oryza sativa
gatgatgatgacgatgtctgtgacctattcaatagaagtgtagcagccaatgataatgacgaagacgctcatcagcatttgcgtagtaggtcaaccatgaaggcgaaataactagtcggcaatgacagaagcagccggaggtgaaaacgtagccatacattatcaatggcggagacgtcagggccgacgaagtagaggtgctggtgatgatgtcagtgacaataatccatcaaactgtcgagaagatatcaaagctcgagtagtttccttgatgcgagcgtgtgtataaagaagactgatgcaacgcttcttgatttatgaagacttaatgttgtagctgttggagatgcttcacttggaggaaagtagatgatgctgtctaactcgttgaatctgtgttaattggttgataactccacaaacgcccagacatgtagataaaatctcaaa

SEQ ID NO: 74408 - DNA, 407 bp, Oryza sativa
  unsure (1)..(407): unsure at all n locations
actcgacccggatctataaccgagcgcggcggcagtctttttgtctgagctgnacaagagctaagcactagtagtgcactactacaattgtagatttcacaacaaacactagtataacttcagggtttagatttcagaacatgcgctactatatttttcagacgtgaaagctaaagtttggcatttctgagcaaacactactacaacttaagattttagatttcggaacaagtattactacattttcgtatggcatagctaacgtgtaaaacttcagaacatacacaggtacaacttctgatcttggatctcagaacaagccctactactgtgtgatcaaattgtaaaacaaacacggagactactttagatttgagatctcagaacaagcactactgcgtttttag

SEQ ID NO: 74409 - DNA, 431 bp, Oryza sativa
  unsure (1)..(431): unsure at all n locations
ntgaagaacactcccatcacccctcacggttgaaattccatttcttttcaagaaacctcgggtggtgaaaggtcacgagcacaaaagatcacaagcctccagaaacaaagcaacaaacgggaacatcgcaatcgtatcaacagtacatgaaagaaaaatgaaacaaaccaacaagagaagagaagaagataattaagccacctgatcttgtccccggagaagagacctttcttccacttccacttcccctttccagatacacacagccaagaacgaagcacgaacttcagattggaggctggaccgctggctggagccagcaccggactactactactggaagcagtgagaaatgggaagccctcttctctctcacacacacacagagaatccgaggaggtagagtagtgtgtgtgcagtctctcggttct

SEQ ID NO: 74410 - DNA, 241 bp, Oryza sativa
cccgaaacccaattaggtacttaagcaagcgatcgcgcgttacaggctccagattagcatgacacgaagagggagttacagcgtgtataaattctaactttattttaaactttctacttttcataactttcaaagtttcctacacacataaactgtcaaatttgctgtcacaattgtctaatttccatcaaactttcaattttgacgtgaacataaaccaaccctagtaccttgagcattc

SEQ ID NO: 74411 - DNA, 474 bp, Oryza sativa
  unsure (1)..(474): unsure at all n locations
tattacggacctataaaactcagcttacaagttgtggaaaatgtcctttgtaaacatcagcctccttgactcatttgtcatggaattgcaggccacaccaactgcaggcaattgagcaggagagaactctccaggtgaagccaccatacttttgaaattgttgacattgttaagtacctcctgctgataaacaagtggaagctgtttgctgtcagaagctgagggaaataatgaagattgtacttcatatagttcaagaagaatgtctgtttctaccgacaagtattaactgactatatgaatacattgcactaccttgatgaactgaagaagaagaaaaattagtatagcacgctgataacatantttaactgaactaggccaacgcaacgtataaatttcgggtaactgaactaggccaaaacagggtataaatttcagttaatcagaaaggtactttacatatcgagtcta

SEQ ID NO: 74412 - DNA, 435 bp, Oryza sativa
  unsure (1)..(435): unsure at all n locations
agcttctcttcaactaggcgtggataccttccatcattattgggattgccaagctgtccatacacagagctcccagcagtaaatatatggcctgaagtagtcaatccaattgttagagtatgaccacacacagccttatggaaattgtaatctattaatgaaggcacacaggttggtttcagttttgaagacctgtcaccatgcccaaggcgatatttatctccatcaccccatgtaaatagctttccagatgaagtatttgactgtgccatgataacctcaacaacagcagcagtatgccacaccccacatgacacagaaattgtcctcaaacccttcaatgactccacttctttcgggtatgaaatagtttctctatttccatgacctaagactncaaatgtgccatcaccaaacgtgtactaatttccagaa

SEQ ID NO: 74413 - DNA, 305 bp, Oryza sativa
  unsure (1)..(305): unsure at all n locations
cggatctcttagatgccactatggtgtggactgggtagagagagaccgcgtaaatggaggagcgtaactatttggacaagtggccggtggcggngggattgtgttgggaggataagaatgggtttggttggtgtgtgcacgaagctcaatggcataaaatcgactgattcatttgaagaaactcggtcgcatgaagggcttgcttttttggctttgccgatttgattggaggtcatagatataccgaaatttctgaattctattcaattttaaacaaatttatcnaattcatgaaaattaaaaaa

SEQ ID NO: 74414 - DNA, 381 bp, Oryza sativa
  unsure (1)..(381): unsure at all n locations
ttgtattctaacttcttctcatcggagactcgggcgtcgggaagacttgcctgcttctgacgattgcggagaagatcgcttccttaccctgtattgagatttcttttcttttctttttacattataacttaaggttctgtttatttgaatgcatctcgtatggcaagttcccgggcaaagtggccagaagcctgtgaactttcaagacaccaatttagttcattggaaagataacacgatacttaaaatttgactagagagtatcacctaattggctttattcaacgcatatgtatgatgcatgtatgcgaataatgacttggcatcggcaacggtgacanaatagacattgattgtttattgcctggcgatgttcattga

SEQ ID NO: 74415 - DNA, 411 bp, Oryza sativa
  unsure (1)..(411): unsure at all n locations
ttcctgcagatgaaattctcagtgctggcaaggagaagccacagatagttatctttggtggcacacttgtcaggggacatggatgtaagtcaattaacttccttgcttgcattntgtcctatgttttcagctgttgttctcatagcgtgggacactgttgttataaggaatgtttcgttgtcgggtaactctgcttgcaaatggtacataaatattgatgtgccagaggtcaacaccctcgctgctaggtttattctctacacttcgctatcagacaatgttctcttagcttactttgtcctgattttttgagctaaactgattctttntgtgcagtgttgaagggaattacgaggcaatcaaatggattgatctcccagctgcacctattcttcagaacaactgtgaaca

SEQ ID NO: 74416 - DNA, 423 bp, Oryza sativa
tatatggcactaatgaagaatgagacatggcacctagttccttcatctaaaggccaaaacattatagattggtaatgggtctatgagattaaaaggaaagccgatgaaagtttatatagatacaacgctagattagtagcaaagcgatttaaacagagatatgacatagactatgaggatatttttagtccagtggtcaaggcagccactataagaatagccttatctctggcaatgtctagagggtggtctctacgtcagttagatgtgcagaatgctttcctgcatgggcttttagaggaagaagtctatatgagacagccacctgaatatgaaaataaggctatgtctaatcatgtatgcaagctagataaggcactgtatgggttgaagcaagcacctagagcctggtattctcgcctt

SEQ ID NO: 74417 - DNA, 447 bp, Oryza sativa
  unsure (1)..(447): unsure at all n locations
agcgtntgttattgttnacttctagaattattttgtacaagttagttggtgaagcgtatacatacaaaagaaaaagcacaaaatgatgcatatttgtatgactttctttttcattttgtcagggcaagctgaanagttctaaccaggaacaaacatcagaagttaagaagaaaattctagggacaaatgtgccctactactatgnaaaagcagatgaaaggataggaacagatcagaaaggaaagcctaatatccacaanaacatagaatattatcaatcgtttaagagaaatgaaggaatatatctgacaatatactataccttaagatttatcagagatggtgctatttagtgataagaataatagcataaacgatgcagtcatgcatgtcggcttggattttaggattnttatctgtgtntggtgaaattagtttccacactat

SEQ ID NO: 74418 - DNA, 399 bp, Oryza sativa
agcttctctatttataacccatgtgcaccaacaaaacgcttggaaatgaaggaatgggttgcaccaaaatcaaacaatattactgccggtgtcgaattgacggggaatgtgcccaatataacctctggtgctgactgcgcctcctctgcaaatgcatgattgacacgggcctgaacgaacttgggtccagcacgtcttggcttcgggcactttccaaccgtgtgtccgggtttgttacaattgaagcagagttcgggtttttcttccaacctcttgggctgttctggcagagctggctgaactgattgagctggaatctttagtgaactcggggtaggggtgagactgtgctgctcacttgtgttgtgactatcactatggtgggtcttattgaaacta

SEQ ID NO: 74419 - DNA, 397 bp, Oryza sativa
  unsure (1)..(397): unsure at all n locations
tcacattccctatagtatntaaagcaatcatcaatcatcctctgccaatagaactccgctctcctaagcaaccaattcatcttgtgggccgattgatgagttccacaaattccttcatgtacctctcccatagccactttagattgatcttcatctaggcacttcaacaagacatcatctatattttggcgatatagatcttcatcaagcaatgtgtatttgaacgcttgccgccgaattttccaatcaaccttaagtgtgggatctttcaaatatcgaatcaatggaattctccaatcctcttctgtttcctgggcacaaatgtccgaattcacaattaatttggcctctaaattgattgtggcatgccccccagcgccctgcccagaaccagtca

SEQ ID NO: 74420 - DNA, 443 bp, Oryza sativa
cagcttattttttatattataggtaacatatatagttagtgagctcaagggtatctctttttttttctcctcctctctctatctctcacctatgcatttaatgtatttatcttgaagtatgtgaattgctaactcttgtattagagcccatcctctctaatattcaaattctctttcatccacctaagcttatagttggcttatagcctactagtatacttgctcttagtaataaggtattcccaacccaatgactatgatggtgtccatagcattaaataagttaccacttacgataaaaaatgatgtggcaagtgaataaatgacgaaagagaaggagaccatatcttgcatgggacatggttttctacacaacatccaagacatcatgtgagataaatagcattatattggagtatggaatacgggcggttgcattggaa

SEQ ID NO: 74421 - DNA, 462 bp, Oryza sativa
  unsure (1)..(462): unsure at all n locations
taatacaagaatgatcaaaactgctcctctttgtcttctgtatgcaaaatataacacaaccactttcctcaaccttattccttatagcaagtcatttatcatcagaattaatgcctctaacattccagcataacacattccaattttttaaagaagggttcatttaaaacacagggataaaataaaacatccagactggatataatccaatcaataactgcaactgaaaagcccaaatatcatagagtaacatgggaaccataaggtctgacaaaagtaaaacatcacaggacactagctgataacagacaagtccaaagcagcctagctgcaacaaaaaacagcacaaacttctaatcattactaactgggctgataggcttggtgaccaatgctgaagaagaaccttacattgacaccacagaagacacctnctccagngaagcaccacatatgtccaat

SEQ ID NO: 74422 - DNA, 424 bp, Oryza sativa
agcttcttttattttttctttggtctgcgatggtcgaagcgtttagctgattttgtgaaacatatgttgctcaatgatttcctggttgataataaagtatcaaagtgaaagccgatggacagtgaacatattcattcatgtgaaccccagataagttctaaagcaaaattgatgtacatgttataagtggaatttttacaaagcaaattttgctacaggacacttcgacttcctagttttaggcgtgggacaccaccccaactcacttttgggtgaaatactccataaacgtggtaattttccatggacaccgcgccgattaaaataataatttccgggtgaagaggagagagaaatcgcgtgaaatatcacaaatacccttgggcccacatgtcagctatcccatctcttctcttctctctct

SEQ ID NO: 74423 - DNA, 447 bp, Oryza sativa
attacttgaccaaggtagatatcttgtaacctgaaacggtactgagggagtaacaaaatttgccacgtaaaagtcagggatgatcacacgttctcacgggctcatcttttcggttatacttatgtttatcagccaaaatttaaattttcaatcttaaatttaaagttgattttgaggtttttttcgtcgaggtttatcttttagatcgcttagaacacgtatataaaagttttattcacaaattattttgagtaaagtgcattggtggtccttaaacttgtaaggttgtgtcatataggttcttaaactctcacaatgcatatccaagcctcataacttatcaaagtgtatcatctatgtcccaaattgacacatcctctctaggatcctacgtggcgctgatgtgacatcctctctaggatcctacgtggcgctgatgtgacatgc

SEQ ID NO: 74424 - DNA, 389 bp, Oryza sativa
catcaaaatcgtggaaatctgtcttatgcaatctaggtccacccaatttctcagaactttgagatcccccactttctgtctctgaattctcccccagatcaaaattcactggagattgaggaaatttggacttacactttaccaggggtcgctcttgggcaaaacttgccccagtagcattcccctggtgattctcttcaacgcagtgcccttcgggcatttgtccctttggagatgtagtctcctggcttctgttctccaggatcgtgactaggaagctgacttgatctacagcttgtccgaaatacttcacgctaagcgccaccgatggaatacacttatccatcccctgcagcgacccgaggatggcgttgaggatacctgtgagc

SEQ ID NO: 74425 - DNA, 307 bp, Oryza sativa
taagctgtccctgtaaacttgaaaacaaatcgcagcggtaaaattcaaataaacccggaactttctggtaaggaacaccggaacttccggtctgccaggcccggaacttccggtgttttatgacaggaacttctgggtaacgtaacaaaggatgaaattcaaatttcgaaacaggagactaagccaatcttcacaagatgatgcacaggtattctaagcagatgatagatcacagaaacatccacagaaacatcacagaaagagacaagagcaattttttcccgaagttcggatcttgcgatcctac

SEQ ID NO: 74426 - DNA, 355 bp, Oryza sativa
gatgaaatattgccaaccattccaggctcttctttctggttgttccgctggaggtctggctgccatactgcactgtgaccaattccgagatctgcttccagcaactgcaaatgtgaagagcttttctgatgctggtttttttgttgatgggtaagtgtcatttggttgtgaacttgtcctttcattaatccataaattattctctgatttaattttatcttaatagaatgagtattgttattgtcaatgcagaaaggatatcaccgggaatgattttgtcagaacattctacaaggatgtcgtaaatctacatgtatgttgatttgtgaacttatagtgtctgtaatccagaata

SEQ ID NO: 74427 - DNA, 378 bp, Oryza sativa
agctttttactgctcgacagtccgcaaggacatggagggaggtgttgtggacagtgcaccacttgccggtagggcgctccctgctgggaacgctggcctccttctttttgtcgctcgcaggcctcccctttctggtggcccgcgaagcgccctccacggcgaggacatgaccctctatgtcggaatggactgacctcttcttcctcctactgtcacgccgccctgcctgagcggcggatctcgaggcggtcgaagctgccacaccggaaccggaggggttccaagtccaggcctcctccatgcgagccactcggtccgcgagctgaaaaagctctgcggtagtctggggcttctttgaggcgaacttttcgagcatac

SEQ ID NO: 74428 - DNA, 456 bp, Oryza sativa
tgtgaagaaatatggaatctgcaagtatttaacgaaataataacaaagctgggtatcttcattttgttctagtataactgggttgctcagagatccattggacactatacaacaaaaacacagctgggtatccggatgaggattcgatgatagtaaaatagcttgtgagtattataatgcagcagcaggcaaaataatttgagaacatttggtcgagatagaacacaacccttcaataagtttgccatgtaaaacagtcaatgcatttcttctggatggaataatgaccatgtaaatcatcatttgtagagtaaaggttgatgagactaatcaatcgaacaaaataattaaaaataacaaaaggcagacatgtggattaaaatccagatccagaaggaaaagaagagctgcaacgcatgtactggcagcagcatcctggattgaaaaattggaatc

SEQ ID NO: 74429 - DNA, 427 bp, Oryza sativa
  unsure (1)..(427): unsure at all n locations
agcttgtatatataaattaaaccctttccttgaactctaacactcataagttgtgtttacatacacaaattgttggcacacattgtatttgtatagtagcagtatcttacatcttcatccatccaaacatacatatacaatcatgaagcagaaatcgttcatggcacgccgccggggaaaccccgagctggttacgccggcgagggcgacgccgtgcgagaccaagccgctctccgacctcaacgaccactgggacctgcgctacctgcagacagccctcaggttctttcgcgcggtcgacagcgaccgtcggccggcgaggccggaggacaccatcanggcggccctcgcggaggccctggtgtactactacccgatcgccggccgcctgcgggagctgcctatgggcacaagctcgctgtggagt

SEQ ID NO: 74430 - DNA, 373 bp, Oryza sativa
tgttttctagcttgttcttacaaatatattacagggcagacatatggttcttcggaattactgcacttgaacttgcccatggtcatgctcctttctcgaagttccctcccatgaaggtataatcaaacgcatgacattgagataaattctagacaatcccttatgatgggtttggcggacttttctgaagatatatagctcatacactttgtcaggtcttacttatgacacttcagaatgcccctccgggccttgactatgagagagattagaaattttcaagggttaatatgtttaatatttgaacagacctaccattgtagttttatgatgagcatgacttcttatttgtcaacaaccattatctcctata

SEQ ID NO: 74431 - DNA, 330 bp, Oryza sativa
cgggttggttgcgaacatggcgagtaaaatacttttgcaagctggtgccacgtcacaaccaaccttcatgaatacccttagaatctcacctctcaagacatttgaggttaatctgcaggactgctagtagcttaccacagtaaccagcaagcaaggcagcaacaacacttcaaactcctgcaccaatcttgtcctaggtacgtaaaaagccaaagggaaattgaaccatgaaccgggagaaagggagagatagatagatagatagatcgtaccttgagcacgcacagtgagtgagtgagtgagtgaatgagttgtaattggaagcgggca

SEQ ID NO: 74432 - DNA, 422 bp, Oryza sativa
  unsure (1)..(422): unsure at all n locations
agcttgttgtattctctgtagcanggaaacgaattagacttgactgggcttctttttcttcagcccgattggagggacaagaaatggacttcagaggaggaataaagccagctgaaaggaacggagaatgggccgagaaggagagaggacatttcctgtttcggcccgaaaaggaatagaggattcaatttacttttccaattaaattaatcactgaaatgatctttgattgttaaaaatacttccaattctcaaataatttcaagaacaatcctgataataattggacactcaaagtacttaacaaggttataatcagaccatttaatgattaatttattatttaaataattgctgaactgctctttgtattattaaaactaagaactgagctccgaaaatccgagatatttcagagagta

SEQ ID NO: 74433 - DNA, 394 bp, Oryza sativa
ctcacacaatcttgctgttgtcggtgattgtggcatatctcccaatgtgtacgtcataaattatgtcaggaaagaagcaatctttcatacatggagcgaggagatatatgggttccggatcttaagatcttacacaacgctgagtgcccaaagtttttatgttccagatccatctaaattaatggtgaaataaggtcgacgccaaactagacgcatcataaatgatatggatgagtcacaagcaggtgggaggactttacgctgcaacaagtgtgatctgtgccgacatacttacaagaaatgcccgaagaatgccgaagttccacgcggcgcatatgctaatccatctggacattcaagtgatggtaggaaccacctggcaatgaacaaaagc

SEQ ID NO: 74434 - DNA, 386 bp, Oryza sativa
  unsure (1)..(386): unsure at all n locations
ggcacctttccatggaggatgaanatatgtangggaagtgacatgactggaaagatgaagaaggggttcccgagcttatcgacatctcgctaggaaggaggaacatgggggtaggacgagtggcggggctcactagcggctggcgttgaggctagtaggagggagggggagtggcgctcatcacgtgcgtggtggcttgaacgaactgatgcggagcaaccaatggggggaaattaaatctagatatccaatggatgggataaagactatacctacgtttagatcagattcttgactgggctacttccatgcgtgtccgtgagcacactcccccaacagcttagcattgccgtttacttgaagaatctctatatagaaaggttttt

SEQ ID NO: 74435 - DNA, 362 bp, Oryza sativa
  unsure (1)..(362): unsure at all n locations
ccctgtgttgggtgcaagcaacaaatggatgaacgggtaccggcatgtagactttaaatttcaattgcctaaataccaaccagccagcccagcagacccacatatgtgtttaaaaatggagtaaaaaattactacttgattcaagagcgcatgtatgaactatgaatgtagggtcttgaaatttattcattcgaaaggatactcttctatgcattactgtcatgacaatcagagaaaaatgaggaacgtggactcaccgagtgtaattccttgcgtatgaaatcaaccacgtcctgacttgacatgtgacctctganaggggaaaaaatgaagttaactttactatgagaatatgaatgaaa

SEQ ID NO: 74436 - DNA, 425 bp, Oryza sativa
  unsure (1)..(425): unsure at all n locations
acattctcctcctctctgcttgatactttttttgtattctaaactttgagtaacatcccttgattattttgaataacatttcttgatttgttaatcgatgcatttatatggattatacatgttcagtttgtaacctacaattgttttttgttcagaatttgatgttaagttttgtgtgttcgatgcttttgcttgtattttaaagctttaattctgcatttctgattggattttgagactctactttggtacttatgaagttccttttcattgaaatatgtttcttgcatggcaattaatttggtattgagtggtttttacctttgcccaacaaatactacttngttcttactggatacttctatttggactaaacagattcnagtctatatgcctacttttattaaagtgatgttcttttttat

SEQ ID NO: 74437 - DNA, 237 bp, Oryza sativa
gagtatcggagggttatacgatacatgctccaactatccgatcggctatgctattaacataacataataccggcattaaaatataattcgaaccaaacaaattatactgcgtcggcttgtggaccgatctatccccatcactcgctttagtctctattaatatcacaaatatctatccctaatatctaccacccacccaataaaaaagtaccctactatctattataaacgccgatc

SEQ ID NO: 74438 - DNA, 468 bp, Oryza sativa
  unsure (1)..(468): unsure at all n locations
ctacanatactcctaaaccactatgtggtaccttacaaactctcctaagtcaccacatggcgcttcataagttagagaaaaaatatgaaaaaaaaaacatctaaccgtcagttttcatttaaaacggtggacccgaaaatattaacgcttcacgtacgctttcctcctggccggccccacatgtatacgtacgtacaaactcctcctccatcaatctcttcttttctggaatgaaacatcccggtatttactcaaaagagctacaggcaattattacaatctagcactctaaaagagcgtaatccaaaataaagcgaaatacaccaaaccaaaatagaagaanatcgaacaggacaaggagaacattattccagtctattggtgaatctccatctataattagaaaaaaaagtggcataactatcanaagatacccaccgtaatttgttaccacaaatgattagatct

SEQ ID NO: 74439 - DNA, 416 bp, Oryza sativa
  unsure (1)..(416): unsure at all n locations
agctttatctcttcgtcggagatcgaacttgatgcagcccaactcgaaagcaaagaactcgtcgaaacaatagaaaaaaggtggcgatgcgccgaagtattattgaactgtcgtcccatgattacaaggtgtcgggtcatatttatacccgaggtacataacatgtccttgctggacacgactcttatctctattacaatttaaaatatgaacaagtcccttatgcggactcttacacaaaatatctctatagaaaagcgtcatcggcttgtcttcatcggatatagcgtcagccgatacatacgacaggcgatgccgcctgtagccgattcatacggcagccgatgatgctcatagccgatacgcactctccctttcttaaacagaattcctncaaatctggctttgactctagc

SEQ ID NO: 74440 - DNA, 192 bp, Oryza sativa
ccactggtggtcctgaattccatcctggatgttgatcccaggattgatgtccccatgacttgcttgaacgatgggaacaggaacgaacccaatattctacgggaattaaatttatcgaaatatatttcccctgatatgatgtaatgggtgctcctcgggatggatgggtggaatcttaaaatctcacataat

SEQ ID NO: 74441 - DNA, 338 bp, Oryza sativa
agtttgttttgtcgcggggcggccaacccggtggacgttgccttctgcggcgagacgctcgccgtgggtggacacgatgaggataaggtcctgatggcgtctgctcgaacggcggtgatagtggatgtgaacactgacccccgtaaggggccccaagctctgtgtggcgctgggcggatctggctaccgtgccgacgaccgttgtatccagctacgactacctcggagactattgtttcggacggcgaccttggcatctatagcggaatcgatgacggtggctaccgtggctggttaccgagcctacgactgctggcgaccactgctgcgcccggtaa

SEQ ID NO: 74442 - DNA, 343 bp, Oryza sativa
tcatcatcagtctgaaaaatcactaagcaccacctcttcgtctcagaaaaaaatcaccacaaatcctcattcctgacaaacaatatgatttatcgacctgtagctatgtctttctttttcagattcattctttatattatgagcaacagaaaagacacaaattaattgattatttttcaggtgatggttgattcagaaatggagattttcagaccattggttttcatttaaacataaacacttgcgtaaaagaaaattaaaacataaacacatatcaaggtgcatactgaacgcagcaacgcatgtagcatgaaaggtatcattggtaactaacaagtactca

SEQ ID NO: 74443 - DNA, 374 bp, Oryza sativa
  unsure (1)..(374): unsure at all n locations
acgccaagagaataacttacactttgcgcaatgaccacactgtgcaaggatggttgtgctccgcgctggctaagaangggactaagtgcatagaccatcgatgttagagcgatataatactcggaaactaaagggggtttttgaagaaaatacaccatccagtcctattgagcgacgtggaccgtgcagtttatatctaacggtatccaaaaaaaatgtctgcttggccaccaatttttcatctaatggatttcaccaattcaccctatccagatttggatgttacacatgattacggagggaaaaatccagaanattgctcctgtagttcttcgagttcacgaatcaagtcctcatagaagacgccgtatgac

SEQ ID NO: 74444 - DNA, 457 bp, Oryza sativa
  unsure (1)..(457): unsure at all n locations
tcagaagagagctcccccggatactagctgatgctgagcggcatagtggtgtgcactgctggtggcagtttaagttttctttgtttctcgatgcaaatggcacatgcacttcaccacgtcttctgcatttcatgactgtttctaaccggaagaaattttataagtgccatgtcttgactgacgatcatagtgactgaatttgctaaccaactgagaaaattcagaagagggcagtacaactctacgagtacactagtacactgctgcttaggtcaaagtaagacgtgattcaactgagaaattcgatttggctcggccaactggttgcaaaactcaggtctcatatgttggttcagatgcaaactgatgggttgtctgggatcagattctcaggatcctcgtttttattnttccacaagtactagcgtgtacgattaacctatcattctgaattact

SEQ ID NO: 74445 - DNA, 429 bp, Oryza sativa
agcttactccctcaatcccctcatctctcctcttcgggtctcaaatcttttgctcccgatgagatgtcgagcttggggcggccccccatgcggcgctattcgggaattagagtcaaggcatcaagctagctcgtgctgccgtcctactgctagaaagatatctcatgatttggaagaacccgcgtgcttgcgttataaattcaaatctactttttgaactgcaatgcaaagagttgccttatggtgaagttattcaatgattagatattgtttgctgctgagtttagttcgtatagtaaatttcactgataatcttttgtggtgattgaacttgattgagccttcaaggatttcttcgtgcagttatttttaaattacacagtacaacgcagacacgcacaacgcacgcacactcacccctatgaacac

SEQ ID NO: 74446 - DNA, 392 bp, Oryza sativa
tgcgaagataccctgaggacatatagtaggtgtattattctttatgcgatacatttgcacgggcaagctcttccatcgaactcaagagattataagaacataatacacactattacatagaatttagccccacattggagccctacatcagatatgctatatattccttactataaaggaactgtggtgaacacaaatagcacaacttaaacagggattttgcatcttcaggctaacagtcttggtcaaccatgatttaacactattttgcaagacaaaatatgtgcacctcgaatcggtgaatggacggtctaatacctaaagaactaatcgacacgatgataaaaatcgtggagagggtccccaaaccctagctactcggagtttttttt

SEQ ID NO: 74447 - DNA, 437 bp, Oryza sativa
tgtattcaagcttgctcgggcagctggaggaggaagaagacatatatataggggtgggactttagttaccaaccggggctaaagatccccgagatctaccaaccgggactaaagatcccgggggggctgacatgccctgacagcatttgaactgggactaaagatgatctttagtcccggttggtgtactaaccgggactaaagatcaaatatgcccgttaccctttataacccgaactaaagatcatctttagccctggtttttattgcatccgggactattgtggaattcgaccgaccgacgaaagatggtttctccaccggtgtttcaaccgttgcggatggcataccctaagctagtccaaaagtacatagtatatatagctgaagatgaaagtccctggctagttgcttgtatatatgctgaagtaagaagt

SEQ ID NO: 74448 - DNA, 226 bp, Oryza sativa
  unsure (1)..(226): unsure at all n locations
tgcagctattgcaatactgcctcctgctctattaagaaaacttgatccaacattangagccaactagcccttagatcttttccttgcattgatgatgaactttggaaggacctgctcagtgtctctgctgatttactgataagaacatgctcaaatggttcagtattgtttgagatggataagaagttaatatccttcctgtatattctcattggatgcaccttct

SEQ ID NO: 74449 - DNA, 413 bp, Oryza sativa
tttattctagcttgtttgcctagacaacttatgatatcaatggtaaggtaatggtaatctattttttcccagaaaaaaatgctaatttaattttgagcatgtatgtataacatatgagcatagtgctacctgtttgcatgggtatatatctagtaactagtaataaacaatctggtttgtaagtgtctaactatttttatttgcgaacttgtgtgtgtatgtgtgtgtgagtgtgtctgtgttgggcacttgggcattagcacatcattcctgttgtttaaattaatttcagatgcactgaaatattcctagaaacaatttttgaatcttgcttattgtaattataatgctgaattatattgtattgcactgcttgaccactatacacattgcgtcatgaaaccgggttcatt

SEQ ID NO: 74450 - DNA, 350 bp, Oryza sativa
cttcttggcagcatttactgtggttctgtccatcatcgcttggccttgttgccctgtcttattagcacacgaactcagtccccagagatcccttatcttcgggaatgtgttgaagatcggtgtctgccccttcaagactgatttatgggagagatcttccttgaatctctggaactgttctgccattttctttagaagccaccttttcattatgatctctgtacccgcaagaagggtgaacgtctcgagcattgtggtccacagcatttctcttcttcgaatctaagacataccttgtccgatctccgcgtgcgcttgttctgcgccagtacaccatactgacacggacg

SEQ ID NO: 74451 - DNA, 323 bp, Oryza sativa
atttattgagaaatgctcttactgttagactcatccctatctttacttatcagttgattaagatatatctcttataggatctattttattcagaaccatatcgagatacttaggctcctgtcaaacgttggacacatttcgtgagacttcaaattatatacattgtgctagccctctttttataaagccttctcttgtatcgcttaaacaatagcacttattgctgtctaaagccatcacataattacttcaattgtatcatagaactatatagatacctggttaaatggatgctcacatctcctgctttggctactaattca

SEQ ID NO: 74452 - DNA, 430 bp, Oryza sativa
  unsure (1)..(430): unsure at all n locations
agcctgctttttattcttgnagtcccgcgacttgctgagtgcgaaagtactcacccttgctctatataaatatatatatagttcctccgccctgaagagaagataaagtgaagtgaaaattagggtttccgtctgattcccagtcgtcgcctgtggagttgggtcgtagttcgatggttccgctgctgctgctgatgtgggtgttcctcatccttgtcggcagttgcattctctggttgttctgagctgcaacctacggtaacgtaaataaagtcctctatttatttcaaagatttgcaaagattcatatttgttaccgtgggtaccagcactactgtactggactggtaccgagatcgcggtttctaagaagcggttcggctcgttttctacacacgctctttaggtgccgttgaccgtgtataaattg

SEQ ID NO: 74453 - DNA, 373 bp, Oryza sativa
ggacttgttattattttgagcaacgcaagtcaccctggtgtcaattgcctcctataaatgaaaagtcattattatcttggttgccacttgcattattagattcacacactttacttgcttggcctccgtttgcgtgccaaaccgacggacctacccaatagtcgcactaatttttgtaggtcgtactaccctgaatccttgtcgctccacccttgtggtacttcagtatccgtgctctctgagcgcgtataccaaagtttccacatacaccgttgcttgtacaaaacttgggaaatgggtttgtgaagccttcaaaacccgacatgtggtgtcggtgtgtttgaaaataatatgtattgtgataactctctat

SEQ ID NO: 74454 - DNA, 461 bp, Oryza sativa
  unsure (1)..(461): unsure at all n locations
agatttctctagtacaagtgcaattntctggacttactgatgtcgtcttcttgggtcagggcacccatgtgggacagcactgtccagtgccctcaatgaactaactattagtcctaacagctcctctgattgctctggccattntgtctgaaaaaaaaaatccagcagagcaacttattattgttatcaaagaagaaagataaaaaagaagctgaccataataggaaactntaagtcataccctggaagcctggtcagagccttcatcttctagcaaatcagcaccagatacttcagggggagaacaggactgttctaaaactctggcaggaatatcattngtacacttatctgtgttttgacagaaagcctatgatggatatcatcattgccaggtttcagcctttcatacttattatctgaagcacattctgtcagttcaccttcaacattgagctctg

SEQ ID NO: 74455 - DNA, 354 bp, Oryza sativa
  unsure (1)..(354): unsure at all n locations
ctacatccacattccgaggtgacaagcataaagcacagagacaatgcagacaccaagtaccactatcatgtgcatatcgcatatttgatgtcacagcatgaagccaattgacagtaatgatggtaatacctttaacttgtcttctttcacgtactccttggcttcatctcggaggtgcagtcttatttcagttccacggcccaggggttcattccatgtatcctcagagatagcgaatgatccatcagctttggactcccagacatgcctatcagagaaaaagtgcaacagcagaacatgaagtangttgtcatgccagtgaaggaaaagaagatgaaccaaaaacacaatatg

SEQ ID NO: 74456 - DNA, 434 bp, Oryza sativa
  unsure (1)..(434): unsure at all n locations
ctcagctcgattcttatacacctttttgttttgtgtgctatcatggaatccatgcttaaatatgtttcagntctacttaggtggtatgtttttccccacaaaattagtgaaacgtgtctgaaatgctcaaaagatgaatttgntagcaattagcaacaacgtgaacgtggaatgagtttggatgcgtgaatcacgatgggtgcgtcgaggggattttttttttggtagatagatattggcttgttatatagttgaaactccaactttacgtcgagttaacctgtcatcccttatctttacgtcgagtttgtatgacattcctaatccacaatactagaaatcttcatcccctaaattatattaaacagtgtaatttagattatatagcagtatataatggtggatagtacagggagagaggatattgcgaatcg

SEQ ID NO: 74457 - DNA, 366 bp, Oryza sativa
cttgtagcttgtctttatggaacgattctccagaattaactggactagctagttaatgagttattaagaacagttaactaccgaaggaagatggtggatgatcgaacggtgggagtgaaacgaaacctgatagttactgtggaggactgcttactttcccgtttaactttttcatccttaaccgcagttgaaaccgccgatgtgagcaggaaattacagtggtaatattcgccgtttggggcacataatccataggcagttgaatatgtaatttgagatggagacgaattaacccaccaacacaagaggtttacagtgaattcgaatcgggctcagtacgtgcactacacagactctcgcactata

SEQ ID NO: 74458 - DNA, 420 bp, Oryza sativa
  unsure (1)..(420): unsure at all n locations
ctntcttgaaaacccatttgcattctacgggcttgcacccatatggacgctcaacgacttcccaagtaccattagacataatcgagtccatttcactgcgtactgcttccttccagtagtcagcgtcaggagatgaatatgcctcttctatggntcttggggtgtcatccacgaggtatacaatgtagtcatctccaaaggattttgcaaccctttgtctcttactcttgcgagtatctacaatgttgtcctcctcaggattttcctcaggcgtttgatcattgtgttctatcggtgcanagtgctcatggngcatgacagtttctttactagaagtgctaggtgtatatttcataggaaattcattctcaaagaatgtagcatctctggactcaagaaatgtaccaacatgcatgtcgg

SEQ ID NO: 74459 - DNA, 422 bp, Oryza sativa
  unsure (1)..(422): unsure at all n locations
catggctcccattatggctagaaagagcaataatgtcacgcccacaaattcactagtaatatccgaacttatttgtgcataaaatcctcgtccaagaatcagccgaggtacacaaactgacaatttaatatacaaatccatcataataataacgctacacacttacaaaagataagaagacagcagcggaattaacggtctagcgatggcttcagctccactcccacaggcagctcaactggggtataagccaaacgtcttctccttctggatccttantcttcaactgaggatgattgattattgcaagaatgagcatatgacatactcaacaagccacacagcagatatgcaagtgcacaaggataccaaaggatggcataatatacgctcatttgcaacatcagcatttagcacaacat

SEQ ID NO: 74460 - DNA, 82 bp, Oryza sativa
cccgggacttaagcaccgagcgcactttattttggatcaccgcggcgggcgagaacgcccgcgccgcgcgcgtactacagga

SEQ ID NO: 74461 - DNA, 381 bp, Oryza sativa
  unsure (1)..(381): unsure at all n locations
gctacacgcttgatgtcaagctaataggctnntttatatataaacttacatttttccagtaagtatgtgtatgtccatagataaaaataaagaaatgcgatgaagagaatcaatcggaatatcagtatttagatgttaccaatgatttaccaacaaagattatatgaaaaactaaatatattcttgctcctaaaatgctctgactaataattaagtcaattttaccatgcaagtaataaggttctgttcgttcattggtgttgggaacacttccttctcagtatacaaaacggaacgacgaattagcacgagattagttaagtattagatatatattctttagagagttaacataatttttaaaataacttntatagagat

SEQ ID NO: 74462 - DNA, 401 bp, Oryza sativa
  unsure (1)..(401): unsure at all n locations
tatagctgccgacatgtgagtntcatcctcatatgaatcctcacgattatgccaggagcaacaggcattatggcccactctccaacccctcattcgatgaggggaattagtctttttccctttattcttcttaacttccacagcaatacgcgacgagcactttacttcttgtttagatccatttggaatggcaaatggcaaatgacaaaagttttggtattgcaaaagtactagttggtgtttagatgcatcctaaacttttgccattctagtactaaagtgagagagagaaagagagaaggagtggtcccaaagcactttttggcacaatttgctactatgaactagcaaatgccaaatgccaaattgctaagttttgctactagtgtttagatcaaaat

SEQ ID NO: 74463 - DNA, 376 bp, Oryza sativa
  unsure (1)..(376): unsure at all n locations
agctngtatttagcagcgggcgactccactccacaggctaaccttgacggcagcgacgaaaccaacctctctgagacgggtccaactgagaagaacttcaactctggtgtgggggaaaagagagcaagactgagtactacccactgtactcagcaagtcataccggaagaggaggtatgatgcaggatataaccaaaggatgctaggggttcttttgcataaagcaggtatttcaaagcagcagttgaaagcagtaaaacagctgtagtaattaatcaatattaaccaatcactgtccaacactacaccacgttgcaacaggcccaaccaaccacctgaactacaccagttcattaagttaaactaggggtgagac

SEQ ID NO: 74464 - DNA, 404 bp, Oryza sativa
  unsure (1)..(404): unsure at all n locations
atatggngccacaccgactcaacccaacatcccaatggagtttggatgtatcgaagacttggcaaacacttgcttgacgggtgcaatcaaaatctgggagctctgggtgggctttaatatgtagcaaaggaataacagatgctcctatcagattatgcaaaaatgaataatcgctcaaagtcagtactgtgctgggcctatgctataacctactaaagacgcgagcctatacacaaacggcgccacaaaatagtactagaaacaactcaagcctactctgatatatccaagcgatccaaaagataacaagngagtgtttttcctcccttcattttccttctttctctcctctatctctattttctcccttttttttggcgggggctttcttttcttattttttt

SEQ ID NO: 74465 - DNA, 435 bp, Oryza sativa
  unsure (1)..(435): unsure at all n locations
tgcagcttctttggctccttgagagctctggttaccaagtaacatgcatagaccttgctggagctggtgttgaccctaccgaccccaacacagttcgatcatttgagcagtatgacaagccgctcctggacctcatctcagccataccagaggatgagaaggtatatctcttgtgtgttcatgcaatttacattaatttataagaccgtccagttcaacctaagtggcatgttattactgctagcataccaccacatttccatggaaatgatcaaaagataattgttccatgcatttntcaataaaatggagatattggactaaatgaaaggccacagttatgctaatntcaggtggaaactggttgtattaaatctcagtgctctctgcatttacaacaacgatgaatcaaagaccttacagagaacagatcta

SEQ ID NO: 74466 - DNA, 328 bp, Oryza sativa
  unsure (1)..(328): unsure at all n locations
agcgctagactatgctaacacatgggtgggaaaatcaggattcttacaacctgtgggccgattcacataaactcactgctggattgaaccattctaaataatactttcaacatacatatgatacaatctaaaaccttgggaagcagcgcatgctaacggacgtgtaatagcctctgttgtagcaacaggagcaagagttntatcaaaatccagaccctccacctgagtataaccttgagcagtaagtctaactatatctctcacaatcatgccatactcactttgcgtattgctgaaagaccccttggttccaattatactatgtcca

SEQ ID NO: 74467 - DNA, 423 bp, Oryza sativa
  unsure (1)..(423): unsure at all n locations
agctttgtcgtctatggtgcgtgcagcagcatggtttccgcatatcccagaatgtatgtctttcagcaattgtctcccttcctctaaagatacgcagcgttgcaaaattcctgaagggcttttcttgtataactcagattcgtgcataacataaagtttgctccgccttgaaatccgctcggcttcatctttatcttgagggagctcttgagaagataaaaatcgtatgaagggctcgcgccagtcggcttcaaccataactacatcatgagtgtccgcatcttgagtagtatctntatgaggtacggtcggtgtataaaggtgttcgacgaanacatctgatggcgccgcctcgcgcttggatcccaaaatggcaagtctgtcggcggcttcatttgtgtgtcgaagaacgtgactgagctc

SEQ ID NO: 74468 - DNA, 395 bp, Oryza sativa
acatcggatatatgttgctgtccctgcgaggatgaagacgcctccgatttcttctgacatttaacaatctggtcatcccctccattatttgttgtatacctggtccccactccgtcatcatcatggtccattgggtcatcatgcaaaggtatcgcaagttcgaaaccctccttctcaagggcaaaagtcaccggataacccatttgaccaaaaagaacgtctgtggtaattggaaagtcggctctgctcaacacaactacccttactcgaataattccactttggcggaaggtgagcatgtctacttctcgtgttacaccaactacacactctattgcccagaacgccaaataatgacgccatttgtgatggacaccattgatatgaacccacac

SEQ ID NO: 74469 - DNA, 349 bp, Oryza sativa
  unsure (1)..(349): unsure at all n locations
agcttaattaattcgtgtctcaattttcggatggaatctggaatttgttttggtattagactacgtttgatatccgtatatccaatgtaacatacatgcattttttttgccaactaacaagcccttagttgtcgccggtccctaaacttgnaccgactgagatattatgtgccttaaccataaattaaccgatcaatacctctaacattgtcaagtatgtcattgctgtcccaaaaacttcataatatactatcttaagtctgcataatgtttcttaagcacgcactgacgactcttacttgtaagtgtaatcttgatattaagaatatactataccgtcttgatgaat

SEQ ID NO: 74470 - DNA, 436 bp, Oryza sativa
  unsure (1)..(436): unsure at all n locations
agcttgnttctaattatccaggttctccataaaaatttgacaaggctcaaagataactactttcagaaacgtgagcgcagggcaaatctggcatgtcagcacttaaaactacagaacggtgaggtttgcacacaacggcnaaaaaaaaaaagaaaaagaaaaaagagcagcagctagatttcgtgcgaatttacatgattnttttaaaatttgtgggttgctgagagcaaatcttttatgaaaacaatttaacgaacagagcgactgttcaaacatcctgtntaacaggaggtagaaagcgatgagtttggctttctcgcacagtangaaaaatttgcttgatcaatcatatntatcacgattatgattgctattatgtcaccaaatccattatttataccggtaaaaaacttgtccctgattttttcttttacat

SEQ ID NO: 74471 - DNA, 234 bp, Oryza sativa
gtgtcaactatagctagctcaaaagacaacatgtacagatgaccattgtatataacatggaattcaatcttagattattttatcctctctacttgttcttaacctgcacgctcatgttgttggtttgtgaagatgcaactctattttctctccattttctcccttccatgttagcaactacttcctccatttcacaatgtaagtcattctagcattttccatctttatactgga

SEQ ID NO: 74472 - DNA, 396 bp, Oryza sativa
agcttcaatttataatctataacatccaactagaacttaagaaacttatacagtaaacctttcaattcaaagtctaaaactctcaaataaaactaaaaaaacttgtgacttgtgacttcaaactttcaaagtttctactcaaattaacagatagaaacaaagcgcacaaatacatctctcttgttcaaataaaccaagttttgagagggttacttagttgtctgaggaattataatatgtttatttcccaatctcctaacggtcattcatttgtactttcaaataattattacaagctcattttcaaccataaccaattgaccaccatctaagtcaagtgtgaccttaagattcaaatgtaacataatactaatagtgtaccacctccctcatttt

SEQ ID NO: 74473 - DNA, 472 bp, Oryza sativa
tgcttgatgccgttttcctgcatgttcgtgactgatagccttatggaagatactgatcatgagctatgcaccgttgcggtaataacagcgagttatctgctatatctctttatgtttgagcttgcgcactctagctagcgctagctattattgtgatctcttgtgttgatcttctttttatctgtctatcacgtggagatgatgagttcaggaaaactcatgccatgtagacacttgttgttctatcaagactcccttcaccgataagcatccataaaaatggttcatgtttagcaatagcacggtgttatcctaactgagcttttcttctagccaccgtccacatccttcttcataacctcaacatcactttgtggtgggaattaaaggaattggtcttcttgaccttgcaagaccttttcttgaccttgaagacccaacatcggtgagtgggttttcttgttcttatttt

SEQ ID NO: 74474 - DNA, 372 bp, Oryza sativa
  unsure (1)..(372): unsure at all n locations
agcagctcgnacccagggattctatttaacncaactgcatgcatgcaagcttgttttcttccacatcagagaataccaaccatatactccgtcaaataatggatggagggaggatgcttctaatatggcatggtacaggaggattactattcatacatcttcagttccctagttacacagctctgatcgcaagaacatgatcccagcccatatagtacgcatgaaaacagagcggcccattaacacgcgaataactaatcatttatcatttttttcaaaaatggaccaatataatatttttaagcaactctcgtatagaaactctttaaaaaaacacaccgtttatcactttgaaagcgtaagcgtggaaaa

SEQ ID NO: 74475 - DNA, 390 bp, Oryza sativa
cagcttggtcatcattctatggatggattggttggctaagcacaaaggacagatagattgtgccgaaaagtccatcaccttgcaaggacctggaggaaagcaagttcgctttacccctaacacccctaccgcaagtcggtctatcctaacctgtttgcaaatcacctccttggagtccgtgcccataatctgtgaatatcccgacgtatttccggaagaattaacaagaatgccaccagaccgagagattgagttcgccatataactggcaccaggcacagctccaattgcaaaaagaccctaccgaatggccgctaatgagttatcagaattaaaagacaaatcgaagaactggaaagtaaaggttatgtgcgacctatctcatcccct

SEQ ID NO: 74476 - DNA, 433 bp, Oryza sativa
  unsure (1)..(433): unsure at all n locations
tcttcttcttcttacttcctcctctggctctcttgctctttctatgctagcactctccatgctcttcttgaccttgtagcattggctccttggtttccatccatggatccacgctaaatgcattgcgaagctgcaaattggtagcattcccttccccgttgcatctgctgcaactatgtaagcaggagtgtctgatttgacacgcctgaatacagcttctcagatcttcnagtttgttgtttgtctgagaaaatgagagagagagaggcctctcttgggtccaagaagagaaaaatggatgagagcttcgtgcccctccgtggcatcaagaacgacctccatgggaggctccagtgctacaagcatgattggaccngangattccgcgccggtatcaagtaaataaataaataaataaaatctatcttacatt

SEQ ID NO: 74477 - DNA, 415 bp, Oryza sativa
agcttctactgttattacttctacttggtagcgtaaccacaatagcttatctgaatcttcgctgactgatccgaagccgaaaccatcaccagtcgaccatggaatttcaacttttactgcatatatgatatatacggatgatcatatgatgacagattgataagtaagtatatagtaatagttatttactagtattgcagattggatagcgtacaatagattgcaacttcacgcatcgaagcagctagctactgattgtcagtttcatcaagcttcatggataaactgatggccgatcagtatgggcggccgggatgaatggatgcttcaatttgtcaactgggaattttcccaacattgtttgcacaatcccaagaaatttctcttacagttatatttctatggtcgctttcgt

SEQ ID NO: 74478 - DNA, 416 bp, Oryza sativa
agctttgtctatgatgctttccttggctatagtggcatcatacctgccctgacaatgacattgggacagagtgtcatgccaaaataatagataatttggttgcttctgttccacaagtgtggtctattaatattataattcgcctctcatgcaaaggtaaccagcactgtatgagtaaaatatagaggaaggaataacttttaaaacgaaattattataaatataaaaccctattattatataatatgatcttattcagtaagatggccattctggatgaccatctatgtgttctatatatagacgtagctcggtcatttgtatatctacttattctcttaatatttactccataataaagccaacccctattataatttgaaacgagtggattagtactagtcagctgtacttat

SEQ ID NO: 74479 - DNA, 480 bp, Oryza sativa
  unsure (1)..(480): unsure at all n locations
tatactcataccttaaatgcagccatgtcatccatgaaacgtgccacctcaccgccagccctaacggcatcattgttgccaatggcccactcaagtgtctcctcggttactatatttcccatgccgacaagtatacatacacttagtgcttgaatacctgcagacatcaccgacacttctatttgctctttgaaacttggtacgtagttatgatggaaccattctgcctcctggagataatacccagataacaattgaaactgcataggagaaaacagaacaatgctaagatctatgaggtangggtgtgtgtgtatcacatagtaagtgcatgctgatactacctctgttctttacttgtccaaacattgatatatatggctgtgttctttttagatgtttgaaacagtaattagccgcacgtaatacgagaaatgatattagcatatgaataattaagtattaatatataaaaatttg

SEQ ID NO: 74480 - DNA, 448 bp, Oryza sativa
agcttattccccacagtatgccaccaaaaagatgcagaaccggtacacttattactagcagccttaatcatttgagcattagaaaaatcatactcatcaaattgtttttctactgctagctcccaattaatgtatgcagcggaatcatactttccatcatagactggtaacttacatgcaacttgtgcaaaattatagtcatgtacctcatatgcatcacgtgaagaagtcgtcatatctcgtcgaaggtgtagatgttgacgttgagcataaccatcttgtttccccttgcgcaatcctgccatggttagcagcaaacaagatacatacacaagaatatacacgctcctatcaactactatgtactggcagctcatatctcacacacactcaagctgttaaccaagctcttacaagatctctccatgcagtggatgtgatgacaccg

SEQ ID NO: 74481 - DNA, 386 bp, Oryza sativa
ctataatactcagcttatgttggtggagatctgcgtggactccaaatgtccattcttctcattgcacctgcaaatctgtatcaagtacttctgtgtgctgcttcacttgccttgtaaagtattggatgatgcctctggtgcgtggagaatgagatgcaccctcctcatctttatactctggacctgccatgatttataaatgaaggacaacataacaatggaggatgtaatgtaagccctacacaactattgggatgtagcttttgcaagacgctcactctcacttcactcgcatcttgtctcacaagctcttaccaattcttaacttgcccacaggatgtggacagctacaccacaagttatcaaccgtggaacgaggtgtatct

SEQ ID NO: 74482 - DNA, 417 bp, Oryza sativa
  unsure (1)..(417): unsure at all n locations
ttgagctcgtcccgggatactctagagctacctgccgcatgcttgctttctgatccatccacaaatagataaacaacaagcataatcacaggatctaaacaggtacactccttaagatgccccttggaagtagacgttgcatttagacaactcagacatcaagtcctctcatcaagaagttgatattctcaacagaataccctccagataacatttggaatgcatggagaaacttctgaacaaaacatgcagatctaatacctcaacgacctctntcataggtaatgcgggacctcccagatcctgcaccctcgtaatcatctctcattgaggatccaccacttgccctcatggatcctccgcttccaatcttctcaacagctttatttcacttcttcacttcagtcaagaactgat

SEQ ID NO: 74483 - DNA, 361 bp, Oryza sativa
gatgggagtggttctctcctggatttgattattctgtatattcgagggtgattcagcgtcaggggcatgtcataacgcataattcataagaatctgccggaaatgagggagaattctcccacctctcgcggtcacggtcgctcgccgagtcgctcgctgagccctccgtgacatgctcgctgcctgcctgtataacatcaccaaatagcacgcacgcttcagcaaccggtgattagagatctgggatcatttttcgaattcgaattctagggtgtcgattccctcacctccgcgacgtctgatcggcacgcgaggctcctgtcctgagccgccgcgtccactgacgacgccgtgctggatc

SEQ ID NO: 74484 - DNA, 403 bp, Oryza sativa
tcaatcttttggatcgtgtgcctattcctgtgaaagaaagcttggaggagcccagtgcaaagatcaatgttctgctgcaagcatatatttctaggctgaaattggagggtctttcgcttatctccgatatggtctacatcagacaggtaacatgttctccctgctgaataagcttcctgaatttgaattgattgcttattattatctgttttatgacaattgattgcttattattatcttgtttatgacacagagtgctggccgtctcttacgagcgttgtttgagatagttctgaagagaggatgggcccaactagcagagaaagctttgaatctttgtaagatgatagataagcagatgtggaatgtccaaacttccctgcgccaattccctggtattccg

SEQ ID NO: 74485 - DNA, 406 bp, Oryza sativa
atcacgccccacaagacaatgaagcctctctgccagatcgatggtaccattaccaacacaagctgaaagcactgtaactattgtggattcatctgcctcaaacccttgctcttcatcatctcaacaacaccactgtctcctagtacctccctgcccggacaaagccacctatcatagcagtgcacgcgaccgtatccttctcaggcatctcatgaaataatcattgagctatgtcaaactcctgagctcttgcataccctgacaccatggtatgccataaactcgcattccttgcattatcccctgccaaatcaaacacctgcctggcatgctccatgcttctgcactttacatatgcatccaccaaactggtggcacctctctgaatgaacactcgccctacatc

SEQ ID NO: 74486 - DNA, 199 bp, Oryza sativa
tgactgggcttcagccccgggaggtgatataatctgtcctcccatgattttcctgcttttctcctgctatgtgtcttctcggatcggggggatcattacgtgtgtcctgttcactcttgtgttggtcattgttcttttgtctactctggcgttgatgcggcttttcttctttccatctaaaaaataaatgactctgtgt

SEQ ID NO: 74487 - DNA, 388 bp, Oryza sativa
  unsure (1)..(388): unsure at all n locations
ggcatttataaatttgttacttttttaaaaaatattacaacaattacattccaatggtaggtctttttctaataatggtacaataacgaatctcaatgtccgatcgaccaaatggccagcataacctgcttggtaatatgtgccggccgccggcccgagggcttgaacaacgttatggcaccccaatagttatntaaaaactctctataagagtttatgtcaacatatatttctacttgataaagattaaatgaagagagagagcaaaattatctattaatctagagatagtctatagagaataacgagacaatgaattagagagctatatatacccatgtagacatactagtttattgctgagatagttttataaagagcacctcac

SEQ ID NO: 74488 - DNA, 455 bp, Oryza sativa
  unsure (1)..(455): unsure at all n locations
actaagctttggcagtagtcataaactactcgatagctgtttattgtaccatacaaaacaacatgcgattatacctatgacagataatgcgcctaaactataagacaagttagcttctccagaccatacaaatgcacggcgagcccatgcgaagggtttggttaagatatgccaaattccgccaaatacacatatgaaacccaaccatacatgtcccccaattatatcttctaaatcatccacactaacaatccaaccctctcccccaaaaggggatgttagtaaataaccaaatataacaccggggctaagggtcaaaatggtatattttcttacatctcctcccccatgagcccatgtatcatatataaccgccaaatatagagctgttgatactagaagaaagcacctatcctaacataatatgtgaataccanattgtagtatttatttta

SEQ ID NO: 74489 - DNA, 423 bp, Oryza sativa
agcttgtgttcttccgatctggtgcgtcacagctcgtgaaggatggtagcggtggccgactatggagacgatgtcggcaacgactatgagaagaggaggaagaagatggcagcgacgacgatgcccctagcccttcctccgtaccttctactgccctctctctttcttctggatttcgttgagctcaagctccccatggagacggcgccgacaactactatgagaagaggagatgaggtagaagatggcagtgccgctgccgccgacggtgcccctcgagccctcccttctggatgcatcgacccctgcgcgccgctgcacctgtccatcccgagataatggacatttagccacttccataacacgggttcactctaatgccattccgaaaacgtgttcttgctaaaatgctaatatgaagtg

SEQ ID NO: 74490 - DNA, 388 bp, Oryza sativa
tgcgctcatgatttttttctctcgagaacatgttgctcgagatgacaacagcacctcttcggtcatcatcactggtgtggtatacatatattgatatatgcggaagttgcatctgcatacataataatcatggtcttgttgctagcacgatgagcatgagcatccacgatcgcattgaatgtgtttgtttctttattagctgtttacatgacgtgataatctgtatgtttcttcttttagtccaactaatacgatgatctaattatgagattgaagagttatgcctaacaaacaataatagagataatatcgattcacatttgggtctagctaaatctgttatataactacatacaataaaaataattcttctgttgccgtctctttt

SEQ ID NO: 74491 - DNA, 410 bp, Oryza sativa
  unsure (1)..(410): unsure at all n locations
agcttcatattaagtggtctaaatgtgctgaacgatgcttatttcagccctacaccacacgaactctgttgaacaaaagaaacagagcacaaaagagagagggagagagagaagtgagaacaatgaactgttgccactgcaaacatagcatatttagcagccctacaccacacgcattcgtcaggtaaagccaaatcacgacgctgtaacatggtaacagaacgtataataaattttgagttatagccaaccacaagagcatgtatgatacaaggagatttccaacgaatgagcgatgaactgatcacatctttacatcggtagcacctaaagctgattcttccaagacccaaccccctgnggtatcgagacagtgccagcttgttctgtagacatcacaacgagtcatt

SEQ ID NO: 74492 - DNA, 431 bp, Oryza sativa
  unsure (1)..(431): unsure at all n locations
tgtagccgacttagggtgagtttgaggagaaggggattgatattattgtgaagatacgtaaaacgaggtaagccattagcgcatgattaattgagtattaactattgtaaattttaaaaatggattaatatggttttttaaagcaactttcctatagaaatttttttaaaaaaatgcaccgtttagtagtttgggaatcgtgcgcgcggaatacgatgggctttctcacccaatcccccatgaacgaacgcacccttatagtctaatagagcaagtttaatattatagccaactattggctctaaatcatttaaagntaatttagtagccaattcatataatagttacctattttttggtctcatatgtgctgtagctggctataaatctgtagcccgctgctcttctatcttcatgctcttactgtacct

SEQ ID NO: 74493 - DNA, 424 bp, Oryza sativa
  unsure (1)..(424): unsure at all n locations
agcttgttatcttgtgatgaatgcaaaatactgatgagaaaaaggtttgtgttttcatactatagacgtgctctccttgagaaatgggaacatctaaaacaaggtgacaaaactgttaaggagtactttcatgattttaaaatttgtatcacttatagtggtttacaagaatctaatgagaacacaatgactagatttttcagagggcttaatttcaatattcaggctgggcttgttaatgtgacatataatcatataggccaattgttcatgcttgcttgcattngtgagcgcaaaattttggagaatccaacggagcaacaagatatgcttgtgcctcctatcactgatgttntgcangaagttcagataagtctccaaaatgagaagaacgatatgtttgagaatgtcacttcatcactcg

SEQ ID NO: 74494 - DNA, 415 bp, Oryza sativa
  unsure (1)..(415): unsure at all n locations
atggcatacanaccaatccacccgccatagactttttgttttaccaagacacaaaaacaactgtgaacatgagagccaatgaagaacaatcaaattatacatacctgccccacttttaccaccgagtaagcatctttgcagtgcaacacatagctcagcagaaaattcttcagaacctctaccctaagaaagaagagatatgcaaaatatattaagcatgtgcaaaaacatatatatgtatatgaatctaggacccatggtgataccatcgctccaacatgtcagggatgcattttactacttcagaggatgtaattacaatcatgaacgtgtctactactttatgaaaacatatttacacttcacaggcatggtccatatgtccacaatattaaaatacatattaatatcgagt

SEQ ID NO: 74495 - DNA, 377 bp, Oryza sativa
  unsure (1)..(377): unsure at all n locations
agcttctctttgatttaattgccgcccaaaatactcattgtaaacatgaacttgatgatatataaatatattatatgtaaattacaattntattaataaaataaagaaatataaagagttgcatatcaactccaattcactttgacctaaccccacacaacgttgcatgggacaattctctagtttctagtgcgctatctctcatggactcatggttggcagagcaaacacgatcgatgcattagtgtggagtgtggattatacttgctggatgccctataactntgcccncactgttgctgctagctgtgggatcggtacactcccatcttggattatatccttgaaattaatttcctcaatggtactggtgcata

SEQ ID NO: 74496 - DNA, 352 bp, Oryza sativa
tgagcttgagactgagactgagaattcttcttcttcttctctcatgatgcagagagcgagggatcatatgcggctccatctccaagtgcatatgcaaccaatgccgtggaaactgaatctcctgctgccgctgctgaatctggaatatcagcagcagcagcagaagatgagaatgccgatgtggttgatccctctcctgcgacgtccgagcaagtcgcagccggagaagaagaagaagaataggaaacagcagcatcagcagcagaagatgagcaagtcatggccggtgagacctcgcctgctgcgcccgatcaatgcgcagccgtcggagaagaagatgaagaagaagaag

SEQ ID NO: 74497 - DNA, 440 bp, Oryza sativa
  unsure (1)..(440): unsure at all n locations
tatacagatatgctgaagatatgtgaacaggatggattgtatttttatangcccttgtcagatggcttttggctttaagatgctctatgaggaaagtcaaggggaatttgttattntatttttcattgattggcctttggttgatatatatgaattaatatactccatatgcacaacagaaaggtaatattaatatatgcagaattatttctttgctttaagttcttactatttttactatggttactacttattggtcactggtcagataagggtacatgcatatatttttgtgtactataaacttattagagaaactcagcttattgtatgcaagggtaaaggcatggaacaactctgattctgaatangaataacttcttcctttntctgggctangaattgagtgttacttttcattacaangcttatattgctct

SEQ ID NO: 74498 - DNA, 416 bp, Oryza sativa
  unsure (1)..(416): unsure at all n locations
cgcttgctttcttatggtccaagagtacctcttccttcattatttgaagaaagggtggtggggatactctgtactaatatgcgtgtagatgtatgcaagatgtggcttttatagtgagcagctgatccgaggttgcggttgcacagtcacagcacagctctactgctggttactatagctgcagctgcagctgcggccagctgatacgactatcagcctgcgagatgcttagcattntgttatctggtcgtaagattgtatacatatcaacatatttctgtttcagtggtgctgtcaatcgaccacaggagtgtatattacttggatgctntctatttctgatgatgagtataaggatggacgtctggaaatgaccattatgatgttaccctgaatccttcaggatctggtgcaac

SEQ ID NO: 74499 - DNA, 397 bp, Oryza sativa
agctttggctttgacttgattcttttatttgctgatttgctactatttagtatttacaccctttacaaacagcactgcccaactgatacgagcaagctgtatatgtttggatacgcgtattatgcctggacctcgaaaatagttttttgtacaattgtcagaaacacatacgtgcctataaaattgatacactttgataaatatgcacatatcaatcgctcagtttagtgattaatggtgtagtcaataagcatcatgatgcattgatgcaccctatccagctttatgaaataatgtggcgaaacgagactggattttaccatctaagagtgtattctgtgagtttccacccaatccaaaagatacatttagagaatgggtaattggattcatgcca

SEQ ID NO: 74500 - DNA, 447 bp, Oryza sativa
  unsure (1)..(447): unsure at all n locations
tgcttgcaatntgtcaattctcttgaacagcttaagattcatgttatcttgagcaaatagcgccatagagattagttatagaaaagatggatgaatatcagcactatcttaactatatatgcatgtctaattatgttcttcagaacaatgataattgggtgacaactgttaaggttaatgatgtgcttcttgtgtgtgttttgtaagtgaaagattttattttgagccaaccatatgcttacgagtttaagattgggaatcaagctgtcagaaggccaggatacccacctcttgatgaagttgtcgagatgctacataaacagaatattactatgctcatccaatatcctggctcgcaacagtatatatctaaagttgagctatagatttgcccatcatcaaaattcaatagtttctgtatggcatgttctcttgctctttgtcatt

SEQ ID NO: 74501 - DNA, 397 bp, Oryza sativa
  unsure (1)..(397): unsure at all n locations
tatcttatcttaccccttgtgtcatgatcagcaattacactgcttaaccttgcatcatcacacgcgaatttgaattntccaaatacatctgcaacgcagcagaaataatatttatttttaactcatttagtactgtatatttttattttggcaacctcataaggtaacaggacatttcttaattagctagtagcgtctttgtgttgtgctcattgttttggacacaaataagataaatatagccaaccctaataaagagtaaatataatttaattgtatagagcgatgcaaatgaataaaaatataccatggaaaatatagagaaatatgccaatcacattaaatatccatgataattaanacatgctttataattgatgttccaatatcttcttta

SEQ ID NO: 74502 - DNA, 488 bp, Oryza sativa
  unsure (1)..(488): unsure at all n locations
attacgtgacactttaatactcaagcttgactacaatagtggtacgatgcccacgtggctctgacatgtagtttaatgtgggntttaagtagcttctataatatatcatgacccacatgtcgttctaagaactagtcttgggtttaccttaacgggattgttagcattagtttctaaatagaaagatagcccgcgcatatacgtgggcaccttcttatatattataagtgaaattntattatgaatatttatgtgtaggtgaaaacgacgtaatataacgggctaagacatttagggttagctttctcatacagctatagcgaaagctatatcgagctaaatggacctatagcggttaattgtatacgagagcatatagctaagaactctttgtaaacttcattagccgaagatagcggcaactatatatagttggagatgtaaaaccactacgccagatcctcacacctctgactggatacctgtga

SEQ ID NO: 74503 - DNA, 275 bp, Oryza sativa
ctgcaagctgtatgatgttatctaactacaactgagaaggcatcgatttctaaatagttattgctgtgaagagatggacactttaatttttccttttttttttttttcttctcgatagcagcgacactgacaccacacggtatgggatgcgatgcggccaagaatattaaagggccgcacctggatatcgtgccgtgctcatggggcccgttgtggaggagactaggaaaaaaaagaaaaggatataaagataattacttggctgatattataat

SEQ ID NO: 74504 - DNA, 315 bp, Oryza sativa
gaaatactcacaccaccgcataacaataggatgagggtctgttcttttggtcgatgacaaacaatattcacatgctgacatcggcattatatggatcaggattgacattcgtatatacattcctataactatgactctggtactattgacagtgtagtaattcctccggaccaaaatattggacacttatgatatatatagtgacacaaagccttgtgaattaaatatacctaatggaacatgaggtaaccctatatgataactatctctaaccctactctaactacacgagaactgcccatgatacaataatta

SEQ ID NO: 74505 - DNA, 461 bp, Oryza sativa
  unsure (1)..(461): unsure at all n locations
agcttcatctactcacctataaatgacaaaatctaagccaaagatatagcatgcttcaccagtagtcatcatggagaaccatatatgctnttggattntcttttaaaccgacgtgatcgtcatcaatcgacctgtaataaaagtaaaattgaactgtagtctcttgttgggagctgttgggcttgcatagactgtctatgatagacataccgtagtgatcagcatatataattaaagtctaactccaggtgttttgattaaaaatcaatgttagcaacagatatttcttaatgtaccgctctcgaataatatgattgttctgatttctttctacgattacaattcctgcgatataggttactcctggttctacatgttgtaaggtgcatgtcttagtttttcctaagcatacataatacgaaatcataacatataagcggtctatgtcattaatgaataat

SEQ ID NO: 74506 - DNA, 288 bp, Oryza sativa
aatggcattgtccaggttgtattccaacataagctgcgtatcagcaatgagtaagactaggattaatagcaaatgagcagcatgtgctcttggaagcggcaacatacatgcacacagtggaaaagatggcgctcccagagatgtgaatcacataggtgtggcattgagaacggcgaggaatcggagaatttgtttgtcctccatgtggagccatcctacacaaataatggttcaaataagctaacaagcacttaaggcagctttcattaacttatgtctaaattccaa

SEQ ID NO: 74507 - DNA, 424 bp, Oryza sativa
  unsure (1)..(424): unsure at all n locations
agcttgtttttctcaatattctgcacggaacatccactgttgattagaacaaacagcttgtatggggcatatgatctaaaaatagttgcagagggacacagatgaagcattataacaaatgcctcacaatcagatgccatcctgtggcacaagtctaatctaatgaccttgttacatagagtgaaaataggacaaacacaacaacagtacatcttcaacgtgcactaattttgagataagaaaccatgagagcaatcaccagtccaccatcattctacataataacacaacctaatcacattgccatatcctaatgatagtacggntacagaatacattgctgccttttgctgcacaatactaagatataaccagtatcatgaatcatgagacattttgtatccatgcctcacaaaatcaatct

SEQ ID NO: 74508 - DNA, 460 bp, Oryza sativa
  unsure (1)..(460): unsure at all n locations
accttcgagctaccgccattgcctcccaatgcccatatcggtgagaatggtgtgcagattatccgccggtggtggctcgatcgagctgcgccgcccgtcacatgcggtggcatcctcatgccaaatctaacaaggagcacggcggcagcggctcaccgacatatatgaatggggccgacggtgtgcggattatggttagagatntcgttgactttgattttgtatcgagtcggggaaatccaagtggtccctctcgcgttgggccaacgttgcccctatgccagtgcattttatgggccacgtgttcgaagtcggactgggctataatcatgcgcaattcgagccacgcgctgccgccgcttaacttggtgggctttctaacactttttgagtttgtctatagaattaacacccagaccattttaattgttaaatttgctgaaaattatgaatttatgac

SEQ ID NO: 74509 - DNA, 404 bp, Oryza sativa
  unsure (1)..(404): unsure at all n locations
attgacctacccaaacaaaactatgaaatatgtaccaaactttgatagagaaatagaagttccattgacactgacatttttctcttgcacccacccttgttcatatgtgcgactacaaatgaatccaactatggttcataanaattgtgaattatcagacgtnctccccaaatccttttcatcaaaccactcaccccatagaaattntagaagctctgataaacaatagtaattcatgattaagaataacacctagtatcaatctgcaacaggggcaaccaatcaatcatgaagcaggcacaaacaaggacgggaaaaacacacatttccaaccataaataaattaatcctcataataccgcacatatcggatcaaccatacagtccatatccgcattccaccg

SEQ ID NO: 74510 - DNA, 461 bp, Oryza sativa
  unsure (1)..(461): unsure at all n locations
tgtacaatgccaccttgctcatnttctgctggtgatacatgacatgaaactaaagtttggactaatgtataagtatagagcataaaagacttcattttgtagtaagtatgagttcctatcaaaaatatgattgttaccatttatttagtcccaacatgcatgctaaattaaccactaattctacagttccctgacagagactacaagaatggatcagactaaaatatacctccagataaaacaaataacttgatgctagcagctcaaccagtactgagatctacctctaggttaacagagctgacagcatccaactaaaagaactgcatctctaattaactgcaaaaaactgttactggtttgcagactataatttctcatatacctcactagttgaatgatcctcactgcatgtgtgataattcctcatttcttgggactggacatngatctcatatatt

SEQ ID NO: 74511 - DNA, 412 bp, Oryza sativa
  unsure (1)..(412): unsure at all n locations
agctngcttttatccataaatggatctctntagacgacatcccatattttcgtttcctttcatgacaaaacctttcggttgtgccatgtatactttttcctccaaatctccatttagaaatgccgtttttacatccatctgatgtaattccaaatcataatgtgccactagtgccattataatcctgaaggaatctttacaagagactggagaaaatgtctcattgtaatcaatcccttctcgttgcgtgaagcctttngccacaagtcgcgctctaaacttttctatattccctctggagtcatatttggtgttgtagacccatttacagcctactgttgtggctcctttaggaatttcttctaaatcccaaacatncgttagtttcattgattccatttcatctttcatg

SEQ ID NO: 74512 - DNA, 457 bp, Oryza sativa
ccgcctccgacggcgcccccgtcaaggatccgaccgagttcttgatccttgcatgcactctgcagtacctcactctcactcggccagagctcgcctatgctgttcagtaagtctgcctcttcatgcatgatccacgggagccccaccttgccttggtcaagtgcattctgcgcttacgtcaaaggctctctccaccggactccacatcagcaccggccctgtcaagtctctgacggcttattctaatgccgactgggccagctgtcccgactcccggcgctccacctccggatactacgtcttcctcggcgacaatccgatctcttggtcttccaagcgtcagacgactgtctcccggtctagcgcggaggctgagtaccgcgctgttgctcacgccgtcgccgaatgctgctggcttcgacagcttctccaggagcttcatgctcccatctgctct

SEQ ID NO: 74513 - DNA, 452 bp, Oryza sativa
agcttctatgatgaagcacacccgcgtccaattcactacccctctactgctaatgggaaggaatactattcatcccatctcagttattaacatctgaccaatgtgcctaatcatgtttatccaatggaagcaatgcatatgcatgtcctaactcctaagatcagattaattacctctcattgcaacaatgcatctactctcctaagtaactgatgatgctgctgcatgagttaaacttaacaacagggagggttgttactggagtcttggaagaattacacaggagaagaaaaggctaaaggagagctaattaatagctaatgctaatgcatcatcctctctctgcattggtctactgatcactcactctcatgcataatgctgctgctgctgctgatggtgtttgtgttggtagttggtaatgctaacaatcatttgtgatgttgctctac

SEQ ID NO: 74514 - DNA, 465 bp, Oryza sativa
cagtaaagggtgcaattatggtgccccctatgagtggcatgtctaccagtatgtacttaatacagtcatctttcatttgtaccagattattctctgctctttgagtttactgattattacctttcctactagtaatcttaatggctgctatggcataccaactgtccactacaatggtcgtcagggcgactactatattcttgtgagtttactgaagttaataaccattctatgctgccatggagctcaacgtatcttgacttaatcttaattaaaattttccaggtcatggatatgcttgcgcccagcctttgggatgtgtggaattcattaaggcatacgtaagcacctatatttatcccattcattgcctggtgctcgtgttcctcatcatttgtgtttatgtattaaaagtaataacatcattaacatgatgtctccacatataggtgctcgcattgctgt

SEQ ID NO: 74515 - DNA, 426 bp, Oryza sativa
  unsure (1)..(426): unsure at all n locations
ntctctctcttccgccatcggtttcattcaaatgtgctgatttgattcgagggatggcttgtgagaagtgagggattgaggcggtggatcacgggaaggattttgatgcanctttcggaggtggatttggtcggagttgtgaaccctatttcgtcggcgcagctttgcactgtagcagggagtggggaaaatggcgagagttccggcggtgaagacgaagcgtcgcttggatatcggatttttcagttaagggtatcggaggtgctaatgggcctatgcctgaacagtacttcagcccaatacttttaacagcgtggcccattgtgttccttatggacttatgcatattttgctttggcaatattatgcgcacaacagtgttgcccaatgctgatgaaatcctctttatgcgggcatattattctt

SEQ ID NO: 74516 - DNA, 325 bp, Oryza sativa
  unsure (1)..(325): unsure at all n locations
agcttcttgctctccangggtttaaggtttttgcttctgcggtgtgcgctaatgaccgcgacggtcgtggatacgatgcgcggtgctgtctatcggcatgtggtggattggatgcgcccccgcgtaggggggaggccgctcagcggctgtcgctacagcgactgctacggcggatgtggtagatacgtgccacgctgtccaagaaggtgtgcctattatgctttgttttagtctgaccttctatgagtctgttcttattctttcatcgtgcatggtcaacattatggccggattgacctttgttttctacctttcattgttgcca

SEQ ID NO: 74517 - DNA, 476 bp, Oryza sativa
  unsure (1)..(476): unsure at all n locations
tatagaaactatggcggctaanaacagactccaagctgtgttgatgggccaagccagactcccactaatccctattagtggcgactccatgctaagactacatatggtcctctacatggacggactccataaccactgataccgaagagtgagcggagtctaaaaccctagagttgcgctcctcccacagacactattagaccaggagcaccatggagttgaagctgtcgcggatgtgctcatgttagcatgccctgtaggacggtcaccatgcctggaaccatctgccacggagtgggagagggcagaccagctaggaggcaacaacaagtattatgagtaaatttcatctaaccacgagtattatgctctaagttatacaaaatcatagagattttcacacgttaaattntattaaatcacaatgttagatcattttggctctaaactgatataatgttgagtttacaaacact

SEQ ID NO: 74518 - DNA, 393 bp, Oryza sativa
  unsure (1)..(393): unsure at all n locations
agcttcttctttgttcttactttcttctcccaaaaatccttcttttattgattatgagagggtatgattacattttttttcaacatcatgctcatgcttgatggagcataacttttttttttcataatcatgcctttccctcctctctttttttttctttctttctangaggagaaagcacatgatagcatggagaatttattttggcggtaataaggaaatggaatggaatattgcttatctcccagtgtaggagtttggcatctgcatatatgtggatgtatgatcttgatcatagagcatgagaaagttctacacaagtcacaagagnttgacagagttcaatggaatgacaagtaaccaaaatgtatatggtttatacatgatagcaca

SEQ ID NO: 74519 - DNA, 474 bp, Oryza sativa
tgtcttgaatcaacctcatgatgtaaggtgcatagttgatttcctgagtgaaaatccccttagagatggcaatctcttgcatcatgagagacacaatgtcgaattgacgaccctggatgattgcatcgatgacgtgccaagccacccctctaatgtcatcattgttgccaaggcgagggaggatggtagctctcacaatcttgttaaccacactaggaatagtcctcaagccgtcaaccttcccatgtgtgtaccgcgctccatcttcataaaactgacagagatagtctatggagagcgaattgtgagtgtgctcctcatgcaagccatctccaaagtccaagccgaatattgatgagccaccgtaattgcctcctatagatagaacactggatggtgtcggacattcacttcatctcactatagtctccatccacccacactatagcatataactgccggatcatatcttca

SEQ ID NO: 74520 - DNA, 332 bp, Oryza sativa
tagagtatccgtattggtcgaagcctatatgataatttgtgtaaagacatgtgtagctactgcatatgagaatcatacgatatttgattcagacgattaaaattgaccaaatatatcagagcagttccaataacatagctctgctattagctccaatattatccacatcaagcatctaagataactagtaagagtagtatatatacaatagatagctactccattcgttccataatataagcattttaagagttggatacgggtattaagatagtagttagaagtaaatggtggagggctgtgatagattgagtattggatgtaagcggaga

SEQ ID NO: 74521 - DNA, 298 bp, Oryza sativa
accgttgttaagtgcgcacatgcaccctgttggatgaacagaattgtaccgtgttctgtagacttaacctatcccaagacataagtagcacactctagttaactatgttaatgaccatggagatgatctgctgatgagaactaggaacaatgccatttgcggagccggcacagtgtgtccagcacattgtgcatgaacagcttcacttactgcgtgctcatatgatgatcgtgctgcagacctctgtggcgttcatacttaagatcttacatgtcgagtgcaagcgcaccctgtacac

SEQ ID NO: 74522 - DNA, 382 bp, Oryza sativa
  unsure (1)..(382): unsure at all n locations
tatcttctcttactgaaagggggaaagattgagcaagaatgagtacaaccacagtactcagcatgccacaccggagatgcataattaatgcaagggaggtacaacggaataataatatatggattaagttttgcagtaaacagcgtttaaaagccacttatttgcccaaagccattttgtaaagacgatcctagagctacacagtattattaaacaaggccgtgaaccctcacgaacctgccttaacccaaggcctgcgatgattctgaccgaactggcaacccgacctgtgtcccagctcgtcccaagccaacccatgccaaccattccatattttagttgntgagcaacatttaagaattaaaacactgacttgggtaca

SEQ ID NO: 74523 - DNA, 465 bp, Oryza sativa
  unsure (1)..(465): unsure at all n locations
ntatatctaccggtttacctccctcatcaatgtcgagatgcccgttggttgccataggtgtcttaatgggcttcgcatcctccaagccaaacctcttgagtagatccttgatgtacttggtttggctcacgaacgtcccattcttgagttgcttgatttgaagtccaaggaagaagctcaactctccaatcatggacatttcaaattccctagacatcatatcaccaaattccttgcataatacctcattagtagaaccgaatatgatgtcatcaacataaatttgatacacaaagaaatcatcaccaatganttttgtgaaaagagtgatgtcaacttttccaattntgaaatcctttgacaaaagaaaatctctcaatctttcataccaagccctatgagcttgtcttaaaccatatagagcatttgagaagttgaaacatgggtaggatatttagtatcttc

SEQ ID NO: 74524 - DNA, 388 bp, Oryza sativa
tatcttgttctatggtctaatcttggtaactgcatgcattgaagataaacaatatattagaaccataaatatgtgaagctttctagcacatagtatagagacttacatcctctgcgttagtcctgtacctcccattaaccctaatgaattcgcacgcgtaatagccgcaaaggaccgttcctcacggttgcttgtgacacttcaggacatatcatagaaaaaaatagttaaaatttgcaattagtgaaacaattggaatacattaagtgagtggagtattaccggccaatatgtacgtattagcagcttctcccttgttcgggtcttgtctccacccttgaacttgtagtactcgtacgcgctgtatggatgtttgaccgtttcacat

SEQ ID NO: 74525 - DNA, 421 bp, Oryza sativa
  unsure (1)..(421): unsure at all n locations
acttgcttgatcattgatattgtcaatatctctccaatcattatccactagatgaaaaaacccttcttgatgaatccagtaattctcaaaccgaaagatgttggacttangaatcgaggtggcaatctgtattttgattggagcatggtcagaagtatttctagccaacactatcgcctatgtgttgggaaataaactattccaattcgcagaggtgaaaacccaatctaactgttctatgagtggatcatcttgcatattactccatgtaaaagctcgtccttttaaaggaatttctaagagacccatagagcttatgacctcattaaaagcatagatatcactcatattgccttcaggttcgttcctgttctgaaccgatctatataagtttataccccccatgatcaaccaataatca

SEQ ID NO: 74526 - DNA, 403 bp, Oryza sativa
  unsure (1)..(403): unsure at all n locations
cagctntgattttctatgggcacccaccgatgtaacagagaacttgaaagaaatggtggagcacggtgttcttccggcgaaagaaatcatctgctggcgtccggcgtgtggcgaagcattcccgacctctgacatgcatgatgtcgtggtattctcccatttcttctatggtggtttttctctcccaacttcgaaattattcacggggattcttgaattctacgggattagtttgcaccatctcaaccccaactccattgttcatattgcaaacttcattcatgcttgtgaagcctttctagggattaggccgcactttgccctattccgttgcatcttcttcctgaagccccaaccatacaagatcaagcagtgtgttgttggtggagccggttttcaactg

SEQ ID NO: 74527 - DNA, 466 bp, Oryza sativa
  unsure (1)..(466): unsure at all n locations
ttttgaagggctttgaaacagtctctctctcataccatcctcccaaagagtaatttcaccattggtagatccaactgataaagtaataagcgtgataagaaaatgatactatcgttggctaagttgtattcaatcattcatgcttaaagaatcagacttctgtacttactattgcacatattttttaaatagatattaataacataaagagcttgattgtacctagtaatagtgtatgccgagatggatgataatacatgctggttacactatatccctgtgacaatgtacaagctactgtcctgtgaagatcctccactgaccataaaggttggggaatnggtgcaagatatgtggcctgaacataagcgtatatgactgtgaataattgatagaaaatgcaccagccatatatcttctatgcatatgcaacatttactcattaacaccatgttcacttgggcct

SEQ ID NO: 74528 - DNA, 421 bp, Oryza sativa
  unsure (1)..(421): unsure at all n locations
agcttatttgttcattatcaccaactccaagaagagccaatgctctcagtccagcggaggattcttcatgctttatccggaacgaggatagcagagatgagccctgaaaacatgattataatggtttaaaaaaaagcaggtcaccacactaaaaaggagatgatcatgggtactgaaacttatggtgaacaaatggttactgtcagattataaactntgtcaaaattaggataagtagttgatatcatggtctaattactcaaccagaacagcaaaaataagcattgtatgcataatgcaggtttaactgtaaaaagtagaataaagatcaatcctgccaaacagaaacccctataaactgtgcagtagtaactagtaagaatgtgaactgtgatttctttccaaaaccccatctgataca

SEQ ID NO: 74529 - DNA, 381 bp, Oryza sativa
tatcttgttccttgttcgcaaacattctcttcatgcgctcttctattgggagataccacaccacctttgctgggcctcccctctttgacttacttccttcaccttcactctttgctcgtttgtatcttgatgccccacagatagggcagacatccaagtcagcgtattccttgtaatacaaaatgcagtcgttcggacatgcatgaattcttctgacctccaggcccaacggacataatacttgcttcgcttcatatgtcgtctgaggtaaattgttcccctctggcaacagatcctttaacagctcaaggagtgatgtaaaactcttgtccgaccagccattactagccttaagcgtcatgagttcaacacgcatgacaa

SEQ ID NO: 74530 - DNA, 222 bp, Oryza sativa
cgcttgtgttctttattctatacctgcattccagtacaccccccccccccatatcaatatattataataaaaaaataacacctgtcttctctcctagatgtaataatgttctcactttgtttctccttactaaaactgaggagacaatcctgtttttcttgaaaaaatgccctttttcatcgtcttactctgaagctaatattgttgtcccgatatttaacc

SEQ ID NO: 74531 - DNA, 437 bp, Oryza sativa
ttccgtgtgataccgtcgtatctgtatcaatctgctatacctgtccgactctgactctgccgatcctgatcacagccgattcggacttcaaccgattgttgctttgactctgaaacgatcttggatttagattccgcttagatctgatccctagttttgatactcagattaccaaatttggtggttatcattctcccctccatcttatataacatagggttagcggcccctagattagggcatctacacaactctgttagacgttccattattcatacgcgctgtcagctatctcattgctgacatgcgcacacgcacaccggcatagatgcaatctacaccatctgtagtggggcatgaccttatcctattggtttgaacacaggtaaatctatatcaccatctctcctcgatctagtgcaccccgataatatatt

SEQ ID NO: 74532 - DNA, 417 bp, Oryza sativa
  unsure (1)..(417): unsure at all n locations
agcttcttctttgcttcacatcgncaagcgggcaagcgaataatgaggtatttgaatcatacacttgagtttaaaatttggtattctacttcattttctatatacttaagtggatattccgatgctgattttggtggttgtagaattgataggaaaagtactagtggaacatgtcattttcttggtacatcattaattgcatggtcttctaagaaacaatctagtgttgctcaatcaactgctgaatctgaatatgttgctgctgctagatgttgttcacagattttttgactcttatttactctgaaagattatggtcttactctntagaaagtacctctctttcgtgataatacaagtgctattaacattgctaagaatactgttcaacactcacgcacaaggcacattgatatt

SEQ ID NO: 74533 - DNA, 227 bp, Oryza sativa
taccactgatgatcattgcccggggagactctgttgtcacccccgcgggagagtcatgggatcaacggctccgacactttgaaaaagctaaaaacgatattaaaaggagaaaaataagactagctgaaagagaaacagatccgaatagccccactactgcaccatgtatggatcaaagtcgagtgttgcctctactcatctccatccacggaacaggaaagggtggg

SEQ ID NO: 74534 - DNA, 405 bp, Oryza sativa
  unsure (1)..(405): unsure at all n locations
agcttgtttacatgtgccatctgccaggtggaccttgaaccaagtgaaggtatatcagtccatgctggttcaatcttctcttccagctcctctaagccatgggaaggccctttcctttgttccgattgccgcgacaagaaggatgccatggaaggtaaacgaccaagtggcgtcaaggttctatgatatcacttgcaatcagccaccattgtagctcccgcaaactcaccttctttttcaattgtgagcgctctttgtgttacaatttttctctctctcgattntaggcgaattcggataatttagggtgcattttaatttattatgtgaggaactagccgccgtgttgaagtagtatggnggaaggaaaatgtgagcgagtaatagagatgctccattttctct

SEQ ID NO: 74535 - DNA, 338 bp, Oryza sativa
atatcgcacaagttaaaatatcgttcgttacaccgaaataaccaaagatatcatatatcacaattctttggataatactccgatttcaacttcatttttcactccagaaatctggattgctctatcgatattgaacaagtcttgtcacagccgaatctgataaagtctgttctggcagactttacacaagtacatgacaggatgaacatgggaatcctacaacgatgcataacaagcaaaaagaaaatgtgtgataaataacaataaaactaataatgatggtttcctctgtacttgtatcaccttccggcacgacaccaaaactgtctactatcatc

SEQ ID NO: 74536 - DNA, 420 bp, Oryza sativa
  unsure (1)..(420): unsure at all n locations
agcttctgtagtggtggtgggttgcggccgtgcggctcccatgccgcgtgctgggatagtggtgggtatccgactcgacgaccgtccgatctaacatcgacggcccagatggggtaacctatcatttcgaggcccaacaggccgaggctacaaggctaacccacccacaacgaagcccattaatcctttcccgaatcatccctctcggaaaaaatccccaaatcgatccgcctctctctctctccccccttctcgccggcggccggcgcggcgcggcgaggcggattcngcggcgatttccttcctagggttnggtcttcctcctcccctccggcctnctctcgcaccgacggcatcgcccccttccttctagatccgcctcgncatcgaaaaccctagacgaccacgatgccgcatgac

SEQ ID NO: 74537 - DNA, 467 bp, Oryza sativa
  unsure (1)..(467): unsure at all n locations
tcgatatagtaaccatgcatggctacagctgtattttttcttttatgtaagaaaagctgaattgtttcaacggttcttcttctacttggtcagatcgtcatacatatttaggtgggtaattaagctacttgacatagcgctagtaattattggttgcgaataatttctgttcgtttgatagcaggatataattagctaattaaataaaggagcattatattgatactagctttcctggcatggttggaaggccactaactgcaatttaattatattgtaaatataagatatagcctattctattattctattactcccttcatcaaaaaaaaatcctaatattgagtttgaatcctgacacatatcgtttataaaaaccaatcctaaatttgaacctgaaaaanatactaattctagaattgaatctggacacatatatatccatccagaattaaactcaagattat

SEQ ID NO: 74538 - DNA, 416 bp, Oryza sativa
agcttccttcatttgtacaatgtggctaagtataagtatgattcagtcagggatatgtgttctaggcaattggaagactccttgctccccttatcacctgaggcatatgctgatcttcaatagcttttggcaaattggcatgtttttcctgttcaagagcaagttgtgcattgcattgctccagttcagctatgtatcttccggttatttaaccgatcgatgttagcttgagttgcacttgggccggcttccaattcatccagcttagctttttcttcattgatagataatctgttggcttggatggttgtctcgagatctcatctctcacgccgatcggcaatcctcctttgaagcttttcaagcctatcttggatggatgtcattaagtctatctcggatggatccgcaacttg

SEQ ID NO: 74539 - DNA, 427 bp, Oryza sativa
gtatgtgctgcgatcgtacttgcaacttgtcacatatagtttccttcacgatatttggcgactccactgatgaaatctgctcaatgccatcttaacttctacgccaccatgtcgaagcaaaagaaggatgatgtggatccatccaatatctttccaatctcattggatgatcttgagggggatgcacgcaagatcatggaggagcgaatcaatgcggtcacacatgagatgttgatgaaatcatgcaccaagactcgtcaaggtgtggttcttaatcctggaccgtcacccaaagtcatctttgatgatgtaaatactgaagaggtagcaattcctatccgaaaactcgtagcaagtacagtagatgaatctattgttggtattaacaatgaaaacctgttttgatgagcatattaatgagtatatg

SEQ ID NO: 74540 - DNA, 403 bp, Oryza sativa
  unsure (1)..(403): unsure at all n locations
agcttcgttctcactagttgagccgaaagctagcgattttttttttctggagtttttgtgaattttggttcaatctgaggtagacatgctgcgcaaagaagtcaagaagaggggagctcgtcgagttcgtcgtacctgtcgtcggagaggaagccatggcgtcctangctcctatccgaagcagcagcagatgaagcccctctccctctcctcgccgcctccgaataagaagcggccgcgtcttccgtatcaccggcgatcggcggcggcggctgcggcgcttgttcgtgacggagacgcccggcgagcgagggctaaggcttccatgccccggcccccggtggctaatatgggctgtgctggngtctcccggtcgaggaataagttcactttgacttcctta

SEQ ID NO: 74541 - DNA, 433 bp, Oryza sativa
  unsure (1)..(433): unsure at all n locations
tgacaagatntgctcgtgtagttcgtgattggtgtttgtttctctaaggtttcttgagatactcacgatatggattacatttcagattcttgcgtctcggcatcggaagcgatggggaagagggtgaatgcgaaggccaagaatccgatgaaagctcagctacaacatgagccgactgcagcggcgccctctgatgctggatctggggatgcggcggcggcggcggcgcatgactcggggaattcgacagatgaagctgctgctgctgctgctgctgccgcgtctgccatcggcatggatcattgctgacactactgcggcgacagcgcccgcttggacaatgtcctcttggagatcatgacgtccaagcattttccgtcgtgcgatcattgccgggatgatgcccctatgaagaaagggggtggcaaggata

SEQ ID NO: 74542 - DNA, 416 bp, Oryza sativa
  unsure (1)..(416): unsure at all n locations
tatcttggtttcattcattttaccactgaatcgggtctcgtactgccgccggccaacgcagaagaaagatgcatgtacgtgctgnttacacctctcggcgacgcaaaaaaccggtgcctgtcagttgttttgttccatttgagagttgactaatttattgaaggccacaatcatgaaaaaactgacgcactgaagcgtgggaactttctcaatattttgaccctcgtgggaacgcacagttattgctccccctccagtcaaagacattgtttatattccagtccagtaaaataaaagagagaatgtgtatacagttctccatccaatgaagttgtttagaacagcgacacggtatccaaaacagcaatttgacttcttatttctataanaatatntattgaaaaggatatatgtat

SEQ ID NO: 74543 - DNA, 424 bp, Oryza sativa
taacaggaaagcattcacatatgattattgttgttgattcttatgccaaacacaaatatttatatacataaatactgggatctataacagaatagaatgggtttcaataacattctatgcttactcaaattattagaacgatcataccatacccccatgcctatcataattggtactacatgctaaaaaagtttgtgcaaacagttactataaagatgtctcgtaaaacaaagaacagaaatgcagtcttaatgggatcattaccaagaatggatgattagaattgaacatggatgatttgattacagttcaatgtggcccatagtatcttatcattgtgagtacacctgtgtgttaattcacaattctgttcccatgtgctagggttcaagatctctaatattgcttatgataacgtattgtt

SEQ ID NO: 74544 - DNA, 384 bp, Oryza sativa
  unsure (1)..(384): unsure at all n locations
agcttgcatctattaaataaataatacaaatgattcactgtaattatntgattgatcctaaatccatccgacaacagaacctctagtatatgaccattttatttagatagatgcatgtgtagccataatccttccatagccattagctagactaaaccacatattagccagatacgtatctcattcatactacattggctagctcctagatagaccaccatgacaacagaaagattaagaaaccttagcccctagcgtgatnggaatccattagcagacatgaatagtatattttggtgtgcatatttggttgtattggaatattggcgtttcttgcgtgttatagaaattcatgtatcggtagtcgtgaggcaacgtcagcaa

SEQ ID NO: 74545 - DNA, 382 bp, Oryza sativa
  unsure (1)..(382): unsure at all n locations
actaatcttcctgtcctctgaagcntaactgagtttgaggtgcctattgtggttatggagactgattaaaaaatctggtgagtgctgtccagtcgaactctcacgatcaagcgactggaggtattttgttaatgagataaatgatgtattgtttacgaccaaatttggtaatatgagtatcggggataaagattaaatcgaagcggaatcgattatgaatatcgtttctggaacatattaagaatcggttggagtccaaatctgttatgaccagtgttggttgatttcaaatcagactggatatacacgatcatacgattcgtacatacaataggtgtacatatcagtttgagtatgtgcttacgtgattagcacacgctga

SEQ ID NO: 74546 - DNA, 455 bp, Oryza sativa
  unsure (1)..(455): unsure at all n locations
gcaattcagctcggacccgggatcctctnagtcacctgctgcatgcagcttgtatgttgtatgctaanaggcatgtntgatcgggccaatagcgttatttttttttcttctgaaatttgctaaagcctaaggaaatttaggggaaaaatttgatgacatgggaaggcatagcccctatcgcctcccctctgtcttcgtcattgttgttgcactatgccggncatcaatcatccatgttgaactggctagaagcatgcccagatcgatacaaatgaaccagatataagagaaatattctgaaagagggtaccaactagatataagaaatttacctgcaaatataaacaaccttgcagccaggttcatctgcaatggactngggtagagcagcgtgctgcatgtgggtggacatgagcctctgcgacggcagctcatcaatcttaccaccccatcct

SEQ ID NO: 74547 - DNA, 273 bp, Oryza sativa
agcttggtgttttagcttgtaagctatagagacgatgtgcactagcagcaatccatcctatcacacagctgggcactcgacgccatcaactgctgcttcgtcgccggcggtggatgagcatacgcggcgagaccgttctttggttttgggttcggagatgtagacagcgaattcttggtcgcctcgtcggaggctgctgttggcgacgagcatgggcgcgccgtgcctctgctgcggccgcaggggatcgtgtctgacgaggacgtgaatgcc

SEQ ID NO: 74548 - DNA, 469 bp, Oryza sativa
tcctacagaaagaatattgacaggaagttgaacatctaaccttgctataacagcatgtatatcctatatagccttctaatacttgcaaccataacatatacacgaatacactatgagacgaatatgagaacatctaaccttgctaaaacaacatgtatatcctatagagccttctaatacttgaaccaaccaaaacatatacactaatacactatgagacgaatatgagatatacatcacaggacaggattctagtgcaacggcttcacaatggcaaaggtaatgtgtgcggctgtaccaacaataaatacatacacacccaatgtgatacttttcttctactagttctttaatgtcccatagttgcgagagatattcaatagcacgaaacaatccaaaaactaaattgctaaagctctgtctgggagaaccttacatttataatcagaacgcacatgtcatcgtatca

SEQ ID NO: 74549 - DNA, 413 bp, Oryza sativa
  unsure (1)..(413): unsure at all n locations
tgcttatgtcttgtctatgaagatgatcaattgaaccacattcaaagcaacgatttggaccacctcttttcctgttcctggcattattcgtagctcgagaattctattagcaacaaaagccaaatcctcctcctcgatttgttcgagttgatcatcggatgtgacattttaaacagcatgaaaagtaggcttatatgaaaaagcatcaacatccaaagaataagaagaagaagaaaccaaagcgcttgacttataatcaactttcctagagagaacactcatctcatgtgttngcaattttctatcaagtgaatccaaagtcaaagtagacatgctaacagactcttgaatagatgtaacctctatctcccagatagacatgtcaagaccattctaaaagtgacgagaaatct

SEQ ID NO: 74550 - DNA, 476 bp, Oryza sativa
  unsure (1)..(476): unsure at all n locations
tatgtcagatgcagttttctagtggaatgtggaagccaggtctttcatcactccaaagtcggagatcccaatcgagagaagatctcacttcgtcactagccgatcttcatcttccatatgtgtagccttacatttcagaatgacatgactagtatgagaataccatcccataacaaaccttgtgtaaataatagctccggactatatgatttcttctctaatcaaaagtcaaattttgtcggtatactgacacttcagtgagatctagcattcacagaattggaggtatgactcggtgcctgctgcctagtcctgtgcatgatatnttcattacgatgtatgcgcaacagtacatgtcacaaggtgaaattgcatgaagatatgtatatgggtcaccacagtggttggccgtgggctggaggtatataaatcagctcctatccacaaaatgtcactgttgctaaatcgtgatatca

SEQ ID NO: 74551 - DNA, 417 bp, Oryza sativa
agcttcttctttatcttcctggcaatgaagctcatgaactcctgagaatctatgatcccattgccatctgtatcaacttccctcatcatgtcgatgagctcctgatcggtcggctcaaggccaagataacgagtcaccgctaccagctcttccaatgtgatgcatcctacatatatgacaaaggtgccaatatcaaatgtcaattaggatatcatagacgcatagacctgaaggctgtaaatattatcacgatttcattgttgtgtaactgaagataatagccgtgaaaacatgcctccaatgctattgctatttgcttactagcacatatgatggttttgtgcatatccaaaaccaataccatgaccacaccatgtgctaaacacggtcagaatcattgaccaagatagagacgtc

SEQ ID NO: 74552 - DNA, 326 bp, Oryza sativa
tggcctaacaacgcacgcactgcatgattgaatgcatctttatcccctccgaagtctcaacaatgctcccatgtactccaagaacgtcagtcgtctgttgctttgctcatgattgaaaactatttatttcttatgtgcttgcagttctaacaaaatccaacctatttacttcaggcaacgtgatgaatccggaagaacgaatggacccagcattgacatcgtacaaacattatccctaccattgggtaacctgcaccaagtcatcccagagaactttgcctacttccatgtagagatcggactctaccgcgcgatttgccatgtca

SEQ ID NO: 74553 - DNA, 382 bp, Oryza sativa
agcttgtcttcatttcgggcgactccactccacaggcaacccttgacggcagcgacgaaaccaacctttatgagacagctccaactgggaagaacttccgctctggtgtgggggaaaagagagcaagactgagtactacccactgtactcagcgagtcataccggaagatgaggtatgatgcatgatataaccacaggaggctaaatgttcatttgcaataaagtaggcatttaaaagcagtagttgaatattatagaacaattgtcgtaagtaatcagtattaacccatcactatccaacgctacaccacgttgcaacaggcccaacaaaccacctgaactacaccaggtcattaaactaaactatgggtgagactaatca

SEQ ID NO: 74554 - DNA, 404 bp, Oryza sativa
  unsure (1)..(404): unsure at all n locations
ctaagctgtgactgtcanattcgtacttgacgattattcttgacatcaattctatggcccacttcgcattccatccatttgcttcgcggttatgaagtatatccccgagtgaaaacgatgtgaccaccgtgaccaagtgactttgaaagtagtgagataattttctgacggtaattaagacaccatataataactcttgaacctgatgatatcttgccttggagtcggctaaaacctcgctaacgaaataaattggtcgttggactttttgaacatggccttccttttcacgctcgacaaccaggactgtgctcacaacctgtgaggttgccgacacatataacagttacggctcttgcggatgtggcgaggccaatactggtggagtggtaataaggttcttg

SEQ ID NO: 74555 - DNA, 379 bp, Oryza sativa
agctttcgtgctaaccaactctcatgcgtggggagaagaccatcaaatccaatcgggaaacccggattatgacagaacaaaaacctagctagattccgagcagcagcagcagcttgaccgctacaaaacgccgacagtgccgccgttgttcgctagcaccggaatccgcacggctccggcgagcgatcgcgactccgcttgatgcgtcacgccacctccaactccaacttctccgcttgcaaatccgcactagagtagaccactccagcgggagctccggatgcaaccgacctcgatacttcccccgcgtactcgtactccacaaaccataaaaaaaaaccacaaatccccattgtacagcacacacagcgacacccat

SEQ ID NO: 74556 - DNA, 441 bp, Oryza sativa
  unsure (1)..(441): unsure at all n locations
ttacaagttcatgcaacacagttgtgaccatgctaagtggtttgtcatcggctcctgccctgcatgacatgcatagcatctacttgtatctaaaaccccaaaagaaataaatttaaaagctaactattaagctccaggagaacagcagtaaccttctccgaatctcttccatccctagttcttgcaaataaatatgaatgctttgaagaatgcgatcaaggtcaacttcatatattgtactttgtaaaacctgaaagacaatgtgacatcaggcggatatcctgtatacatgcacatccatagctagcaaataaccacatacctttgtaacttaataaacatttgacaacaaatctgagaacttctgatnttcactgaagggactctggtggtgaggggatggcatcttgatggctaaaggctcagcaataataagcacaa

SEQ ID NO: 74557 - DNA, 406 bp, Oryza sativa
  unsure (1)..(406): unsure at all n locations
agcttttttctttctagacgaacaacacgaagctaattgattcattaaatagttctcccaactcctctcattttcaggtctactctcttccaatctcccccaatacagaacaatagatacataaaactaaacaagcatcggatgtatggactaaggacccaacatttccaagaagttgacgagatgaacgacacgaagctaatcggttcattaaatagttccccccaagtcctcattttcagctctaccctcttacaatctcccncaatacagaacaataggtacataatacaagcattggattcacggagtaacgacccaactaataccaagatatagtgagcagaactgcagaatatataccgagatcaacccatccctgggagcatctgaagaggatcaatca

SEQ ID NO: 74558 - DNA, 365 bp, Oryza sativa
ggctgtttctcgtgctgcataggtgagaaactagtttttgttcgtggattcaacgatttcttcgcgatcaggcgtacggttccgttatttcttatacgttttgtcccgcttttaggtgtggaatcagactggttctcgatttagaaactagttgattacttgttctcactgttacagcggatgagatcgcgtcttcgaatgcgattctggattgcttccatgatacgattttcctgttctcagagctagattctgtggaaagcatctctactttcttgttattttggctcgcttcgtgtggagaatttagtgtgactgttgttggaatattcattgacattttgatccgcttacttgcaaggatt

SEQ ID NO: 74559 - DNA, 189 bp, Oryza sativa
agcttcttctgctttacgacaactaggtatcactaccacactagccgatcggcattatatccgactgcttctaatccatatccaccaccaagcggacatggaagtttaagcctatctgcctatatgatatctacgagggactatgtgatgacaaactcgataatgggtataacgtaatccttatgtact

SEQ ID NO: 74560 - DNA, 413 bp, Oryza sativa
  unsure (1)..(413): unsure at all n locations
ggagtgngtgactgaagtgaaatgagctcctctatttattctacgtgtntgacagataccgtgatgcgataagcatttttgtccttcatccgccatcattgaaagatcaactccgtccctgccacaccctgtatctaacagtgaatctggtgattctgccgatcctgggctacgcctgacagtctgccggataggnctggatgctctacttatcctgctttacccaattctgcgtacagatggcccaattgatagagtatcaatgcaattcttggcccatacttgatattgataggaactcttctcctctttaatactgagtttggtccaaccttcgggtttattggctgcattctaaacatacaccaacactatctgaatatgtcacaattaaaaccctatcaccatgttgg

SEQ ID NO: 74561 - DNA, 448 bp, Oryza sativa
tagcttcctataagattcacccaaaatcttcatagactgcgaccaacagtcaagctcacaaaggtgagttctttcaagaatgctctgcaggacaacatctttgctaattaaagccaacagaactcattaaggcatagccaacctgccttgcagctcacgagagtatatgcatcttcacttggagagggtatatatattggtactctcctctagtttattaatggtttgttcttcccaggatctaattcacgggatctccgatcacatagactgggttaccaccatagtataactcacatgggtctcatacccatctccttcgatgcattgtctatcacatttcgtgatagtcccttcgtgaagggatctgccacgtttctcgctgtttggatgtaatccaacgtataactcggagtctcatttctgacaactcatcgtctttcacatg

SEQ ID NO: 74562 - DNA, 381 bp, Oryza sativa
ttcgagatagctgaaatcgatggataatctgatatttgttgtatccatatgacgatatcaataaatgaattagctattttttaatgtattcatacaaagttgaaaaaatgttttagagaagtatgccaagaaaatcttacatataaatattgtgtatgaaacacatagtctagcagcttatgaagcgtgcaaacgaaaatctataaattcatgatcagaaagaacatggcgcagtgtatgtggcgcatattgctagtcaagctcgtctgaattcggtgagcgaaatgtggacatggaacagaacaagtccttgcaaataatgcatcatctcccatgtcatatattcagaagcgtgagactggcattgattattggtagctc

SEQ ID NO: 74563 - DNA, 351 bp, Oryza sativa
ttcttcttgtgatccctatgcctattaccaggagggtgatgaacaccatggcgcccaggtggtcttaattactgccgatgcctgtggcaatagcgtgccgctgacttaactctgctgccttacctacttctggttatggaatgtattccggatcgctcggcccgatgatttaagagtatgcctgcacgattatgatgtaataattcgcattagacactcgcgtgtgtgcacttgatatatcagctatgaattcgagtgtaccagactacttgatacagcggaatggtactgtttacacgactgattcctgctatgtaaacggagatccacacagctggtatcacagccata

SEQ ID NO: 74564 - DNA, 272 bp, Oryza sativa
  unsure (1)..(272): unsure at all n locations
tatcttttacatcaactctaaggcccactttgcgatccacccatttgctttgcgattgtgaagtatatccctgagtggaaacgatgtaaccaccgtaaccgtgcgaccttgataatactgatataatttgcctaacagtttatcatatatcgcgcatatcatacagtctttctgaaccctgaggatattattgtcttgttagtcggccnaaacttcgctaacgatataaattggtcggtggactgtttgaacgtggccttcctccttacgct

SEQ ID NO: 74565 - DNA, 343 bp, Oryza sativa
agcttgagccttcgtataactatggtactggaacgaggttggtttttctttacaagtagaaccaaactggagaacgtccctagttcagttaattcttcagtgcgtgaatcagggatagattatcgcagatttcttacgaccattttttttcgccgggctggtatatgttctgtagccatcttacccagcctgagtaggagccccttttgttttcctgaacaatgaaattttgctgaagcttgccagaatgtattttgtctctgaagactgaatataaaggaaaagctttttttttttttgctggtgccatcgaattgaattagtgatatcagtttgtaggtta

SEQ ID NO: 74566 - DNA, 320 bp, Oryza sativa
cacacataaaccgttccaatgaagccatggatctgagcatgcaacttggaacggactccctgaccggacaaaatggacacccacataattaccattttttcgggaactacaaggcaaaaaaagttgtacagatgatgggttgacctaacattggagcatgggagttcaactgaatcccctatttttgtctttttaacagaaactgctatttctgctacatatacatgaacaatcacgcatcatagaaattcagaaaactagaatggttaactgaaaggaaccaaccaatccaacttcatgtggctataccgcaccttgct

SEQ ID NO: 74567 - DNA, 409 bp, Oryza sativa
  unsure (1)..(409): unsure at all n locations
gactgaactccattatacttcttacaaagaaattgatgtcatggtaatggtctctattaccttcttgaaggtacaaccaaacggaaggagctacatggtacaacaagaattcatgcttggtctggcaattgggtgtcaaagaatactgcactcaagcttcaaagctacaaaatagaattttgttgtgaccaaactggtcagatntactctgaatntgttctgttaattgatgcaactttaccggatgaagtcgctactttggagattgacctatatttgcacgacaagatggtcaaaacttcagtttcttcttgtggacttcttgagttggatgctcaacaggtatgatgaagtttgtcccctacttttgttttttcccatttaatctgaaaaattccctaatcctttt

SEQ ID NO: 74568 - DNA, 274 bp, Oryza sativa
ttttccatatatgtttctctctttcttcttcacatctttgcatggaattcatttggtgatcaaatatattcctggtgaatgtgatgaattccctgctcgctgctcgctggccgacagagcacgtgatcctcttcaccgcgcgcgatgatgctgctcctctccgccacaattgggccaccgcctgccggcttaatttggggatatcgctcccaacaagtggtatggccctttagtaaaccacaggtgtgaagtcattcacaaagtataattatat

SEQ ID NO: 74569 - DNA, 392 bp, Oryza sativa
  unsure (1)..(392): unsure at all n locations
gcttntctgttattctatggctgagcaagcaaaagcgcacgacctctctccgagtgtgagtggcgacgacggggagccgaacccacgccgtcgagctcgtactccgccgccccctccacgccaaagtcctgtgcgggagaatgcgcccgagatggctgaaaggtccgcgacttcgacatccacaggaggtggaaaagggcggcgagatggggagcgtcgcctcctcgtctgtggtgacggcagcacgccccatggcgcgctccaagctgcgggcgcgctcctacgtcacccgcctgtctgccatgacccggagtctccagcccaacgttggctggacgatgtggccaatattggcatgactgcgcgacagcgcctatatgctggtgggcggt

SEQ ID NO: 74570 - DNA, 440 bp, Oryza sativa
tttgttcatctacgttgacacataataatatagtgtttttatttcaaattatttcctgaagtcaagctgtctggagaacatcttgaaacggtattcatatacaaaaatggcgatgatgtccgggagatatccaaaattaacattactctccataaagaagatggtggtttatataatttacgtggattggattttgaagggtgcttcttttctggacagaacttcagtaactatgatattcaatatgtgaactgtggaacgtcattgtttgatgttgatactccgtgtatttttaatgcgcctgcttacaacaagagtaatgaaaaatcattaaaacctgtgagcgataacggtttaagtggagtattgactgatcgtaataataaaatataaactatcacgggcgtggcaccattcgatgaatattttttatggatgat

SEQ ID NO: 74571 - DNA, 207 bp, Oryza sativa
  unsure (1)..(207): unsure at all n locations
aaaacaaagaagtgagaaaaaaaaaaggggatgtgagctggcctcaaacaaaaaanaaangctcgggaccanaaaagaaagaaagttttttacaccaagcaaaagcagggggggacaatatacgcaaaccatgaagacaagacgaaaaccaatctaaacgaagagacagtagaaaaacaatgatacaatgagcaagaaaaacgaaga

SEQ ID NO: 74572 - DNA, 393 bp, Oryza sativa
agcttcatcattgtgaccgatctgagttgaaaaacatctttgaatcatgcattgataggtcgctcctgcattcttcaatccaaagggcatggtgatgtagcagtatgccccaaagggcgtaataaacgaagtcttcaagcagttggattcttttagtcggatctgatgatatcccgagtaacagtccaagaagctgagtaactcgcaatcggccgttgagtcaaccacctagtctatgcgaggtaacccaaaagggtctttgggacaagatttgttgaggtcagtataatcgacacacatgcgccattgccccgtctttttccgaactaggactgtgttagccagccagtcgggatgaatgacttccttaatgaagcctgctgctaacagctt

SEQ ID NO: 74573 - DNA, 499 bp, Oryza sativa
  unsure (1)..(499): unsure at all n locations
ctattacgtgacactattaatactcaatgcttgattgttccaatacaatatgagaagtattccctccattgtgttttagttttgtcctaactaaaatgtctctaactatgaccaagtctatagaaaaataaaccaacatcaaattaagtacatcacaattcactatgaaatatttgacttaagtacattgtagttgttaattaattttgtacaaacttgatcaatgttcaagaagtttaacttatgaaaaaactaaaacacattattatatagaatggggcgaatattttatttgtttgagcactgaaaactctataagtagtgtgatgatattttgctttcaaaataagatgggcctatatgcatttggtatatgtataaaaaaatctagaagtgtgtggtgcagttaaagtccaaattcagatacatcgactattgaagttngtggtaaaactcatgcatctattatgtcacagaaaatgtaagctcttactataac

SEQ ID NO: 74574 - DNA, 419 bp, Oryza sativa
  unsure (1)..(419): unsure at all n locations
agctttgtgtactattaagatntgaatggctaagacaaacatttcaatcattacataatatgtattcataaatgagggtaaaatagtttctcatgtagccatgtatgataagtgtcatgttttgttgtgttttgcaatgggtaggatccaatgatccataagaaagatattgaaaaggaatgaatgagtctttgtggaacaaatggcatctccaatttgaatcatggcattcgatctatgacaccaaaatatcgtggctttgctgagacaaactgcatttctgtaactgtgaccctccccatcctatcctatgtttaacaatgtagccaccatccacaatgtttctgagaatgtgtcgcacaagttgtcaagatggctatggcattcagctactacactgttngagtacaatgaagcaa

SEQ ID NO: 74575 - DNA, 236 bp, Oryza sativa
cgactcaacctgactatctgcctgccctctccaaaaccacgctgttctttcctactacgtgaggcagcccatcaaacgggatgatggtaagtaacctattactggcctatgttgacaaaaccatatatgagtcaaaatggataaccggccatacctactattctctgatcgacgacttctcgtacacatttatgtgaaagctaatgatactttgaacggaaagacaatttgaccgc

SEQ ID NO: 74576 - DNA, 375 bp, Oryza sativa
atgaacagaaaactgcgggatgtataacactgacttcttattcttatatgcaccataaatattgatatcttgtgctcataattatagatatgaatccatgcgtttaccatatcatgtacattagcagtaaacatatggaccattgaaattcgagagaaaagggaatgggagatatgtaaataattacctgtgcttgccgtcgatgatcgatttaacatggttgaacatcgatactaatccaatgagatcgaattgtatgctacctttctcagagtacgaccctaaagttatctattatctcaatctgtggagcaactgtgcgcatgatgttctattatctagcctactgaatgagaaagagcaccatggcaacat

SEQ ID NO: 74577 - DNA, 454 bp, Oryza sativa
  unsure (1)..(454): unsure at all n locations
tagcttaatatattctttaaggcaatttaatctgtatggtggtatcatatggtgtggtgtagcttcatgtgacaagcaagggcgcaggcagcctatctacttctcgtggcacaaggccagcacatacacatgcaagtgatagcgagttgctttctcgtgcaaacgccaatggcgattcgatcggaccgatcggtcacgcgtgagcagcatgcatgcatccatgcacgccacgagacgagctggccgctcgtgacgcccggccggcgacgagaaaaagataagcttcttgttgggtaggtaatcactccatcctagattatgttcaatcttggcttcttccatttatctgatatgcaattgatcatttgatcatcgtgtagtgataagagatccgnnggtttattnttttacaattatctacatcagttattcgagtaatattgatacgagttat

SEQ ID NO: 74578 - DNA, 462 bp, Oryza sativa
  unsure (1)..(462): unsure at all n locations
ctttgtacttatgatctgaccagttattgtagaattgctaaaatagagtagatttcagtttgaactacagcaatatacacagttcactctcgctattataggctagatttcagtttgaactacagcaataaacacagttcaccgtcgctattataggctagatttcagtctaacctacagcaacgatgtgcatcatctaacattgtgactgttaattgaaaaggtcctgtgctacttttcttggtgaacatgtaaaaaggatgggactgtcattggcaagttgagttagcgagaaatatctaatctaaatcagttaaagtgatgtttgtacatttctagttctctggtgaaacatttctagtgcatggtataccagcctttaattcagtgtttggtaagaggatgaaattacgaagtctatgtttggttgctgctnggagatatatgctaatgttcatcaca

SEQ ID NO: 74579 - DNA, 358 bp, Oryza sativa
agcttgttaacctaacccgacaacgtatatcgtgccacactgtcagattcggctcaatcggctaaccttgtccgactcgaactctgctgattaagatcgcagccgattcgaatttagctgattcttactctgtttccaaaacgatcttgaacttggattccactttgatctgatctctatctttgatacttagattatcatacgtcgactccgagagaatatcgcaattgccttttccgaccgttattccagcgctttaaatactaaccgttgcccccgagaaatctcacaccgtttcctccgttttcaccgccgaagcaaactccatcctctctctctctctttctctctctctctc

SEQ ID NO: 74580 - DNA, 420 bp, Oryza sativa
tcgcagatctctcatggatggtggcaatgcactcattattcttttcgctaaaaccatggatgatatgcagatccctcgcacggaattaaagccgagttatgcgccctttcacggagtcattcgatgtctatccgctacactactcggccagatcactcttccggttaccttcggcactcgggagaacttccgcacagaaaacgtttgcttcgaagttgctgatttcgagacagcgtatcatgccatactcggatgcccggcgttagccaagtttatggctgtcccgcactatacctacatgatgatgaagatgcctggtcctcgatgagtcatatccctgtggagcaacatctagcaagccgtcacatgcgacaaggaaagatgcgagatggcccagacccgcgagatcacgctcgctcg

SEQ ID NO: 74581 - DNA, 420 bp, Oryza sativa
  unsure (1)..(420): unsure at all n locations
agcttggtttattntatttacttcccttctactttgatgtctaaactttattcaaattaatccaaaaacttgtgctattaattggataaaggtcttaactctctcctttcacttgtctttaaatgccgcgttacaagcctgagtacctgtttggtgttgagggttttgtccaggagttgcgtacgatgtcctttgtcattggatttgggactgcccttntttatgcccagattcgtcatgatcgtcatgaagaatagtgccgagtcaaagtcaccttgaacagcaatagtgaagatgtcccctcagtgatgtttgaagctggaggaagaaactacatccatgcatgtcangaagtggcaaggatcgccatatgagagctccgtgatcgctacagtgatcgtgtggccgatactgagtatc

SEQ ID NO: 74582 - DNA, 440 bp, Oryza sativa
cacttgctacttttgtacaacgcttttagtgcgtaagaagtgattgcttaatgaacaacatgttcagctaaacgtgtgatatatatattcgcctccgtcgtaaaatataaaagaatttaactatgcgttatgcatttgtattatcaaaattccttgtgttttataacggagatatgactacttaaaagggttttcttgagttttccttattaaaacatcagcgcaatgtgagagtatccattcttagttattacatactattagttcttgagaaggaaagaggaaaaaaaaataaaagactaactatatttgtggtgccacatgtttcataaaaacaattaaattatgttacactgtaaatgaaatccattcacatgttgtatgtcaaaacgttagttgtaatatgcagatcttacacttatctttcctagtcattatat

SEQ ID NO: 74583 - DNA, 417 bp, Oryza sativa
agcttgaatatctattatgtgctcccttttaagcctgcaggcttatcattacgatgcagcctcatcgtataaatagcatcagcgtctctttcgaatcagcagatttttgggcgatgtgcacagcagaaaaggattagaactaccagtagcgccccattctttcagacaaacctggaataagtattcgcttgactattcaaatcttcaggcttcagagtactacatggtacgactcttaattactttgcgactgtcaggccctgattagcaacattgataccctgaaaatggagtggccaaatcatcggaagatgaacaacatacagataccaacgtaagactgcagtgaagaattcaggcaagcgtcagacgtcatatgtgcatacagccatacactggggataaaaacattatact

SEQ ID NO: 74584 - DNA, 397 bp, Oryza sativa
ctcatgtttgtacttgataggtgtaatttcgaaattaaaaattattttcagaatctctcaagttgagtattattttcagagtcttcctgagtgaattgcctaattaatgaatatagaggttttgaaatcaattactgaattcactattggtacaagcctaagtagattcttaaagatgcagcattctgaagtgcaaggtgaaaaccaacagtggtcttaactgctgctggcaatagtaacaacctttgtagatttacctataaccacgtatattgatgccatggctactaacctcattaattatcaacatgccttgaagtactgctgactgcacactacccctcttcgtataaaactatggtcagatttaaatcataatgtttaattgacagtcatc

SEQ ID NO: 74585 - DNA, 189 bp, Oryza sativa
acaaaatacatcatacgtaccagacatcttctacttttagtgctgcactatccggccgagatacaatatctatatctccacatatatatatatacctataattacccttctacatacatatatctatccttacttcactactcatccaatcacaagcctccaccatgtagttctatgtactttcttaat

SEQ ID NO: 74586 - DNA, 469 bp, Oryza sativa
  unsure (1)..(469): unsure at all n locations
cgtcattatcatttacccttntttgtcatttgtccattcgttcctttaatttagtggatttcagataatcaacaatgtattcctcccaaacaaagaatgtggaattcatatacatccctccgagcttggtttggtttgtttatatgcttatggatcaaattttacaacttttattgcttgtgtattccatttccgctttgcacattgtgtgctttccataatttgtgttgcaagcactttccatatgtgtcatttacacaaatatcttgtaaccattagcacatttcccatgataatggtccttccactatttttagcaaaataaccacttcttataaattagattggatgtgatgtgtctagaaaatgtcaagcaatttacttcgaaatccaattctcatacgaaagggttttttgtcacatggacctctgctgtcacagagatatatatgtgcacgtcacagcgtgt

SEQ ID NO: 74587 - DNA, 439 bp, Oryza sativa
  unsure (1)..(439): unsure at all n locations
agcttatctcaactatattcaaaataatttcatataaaaaagccaagactgctcctattgatatgggctcaagcccctaatcaccttggtgagaaaggaaaaccaaatggaaataatgcacagttgagttccaatcttcacccaaaatcacagtaaccatacgcacacaaaaataaatagattaatctggacaaagagtacaaaagcctcaaatctaatataaaggcatgcatacaatgcgacttgtatccatcaaacacaccgccaccatcttttctcatgaacagaatgcatctacagaaattatctagacgatataacactatcaccagtacatgatgttgtgcataaatctagaaatagatntaagtcggctgtcactggtctcaacaaggccactacccaacagccagtgcctatgtaaatctgggataaactc

SEQ ID NO: 74588 - DNA, 452 bp, Oryza sativa
  unsure (1)..(452): unsure at all n locations
tactaagcttgcattattctnttgctctggtgaatatatttgttgagactttatttgtgatccaataatgctttccaagtgtgatgcatgtaatctcactagtagattaaaatacattcatttctggttgattctacaatgtattgttcaacaaataggtgaacaatactgtggtgacattatctctcgggcattattatgatgatgacacagtaactgctgtgattattggagctggcaccaatgcttgctatattgaacgcaacgatgcaattattaaatctttgggtcgcgttaccaattctgaacgaacggtatgctagtgttaatcttttatttcatttctttaaatctctgatttgatcagtatcttaatgtggagacagaatctctgatgattcttgtctgtattacaatgttccatgaatcacgtagtaaatgtggaatggggt

SEQ ID NO: 74589 - DNA, 380 bp, Oryza sativa
  unsure (1)..(380): unsure at all n locations
agcttatcttctatatactgnattnacacaagctggctcgcaccatggagatgcttatcttctttntggctntactntgtccttgaattggccaaggtggagacacctctgtacctgcgcctttcttttccgccgaaagcaatattcttcacagtatttntaacagtcaaatgtcattcactgtccttgcattttggattgattctatgcttcagacaaaagaacactgttcataacactatttattcggctgaatactattcagtttactgtttattcggctaattactattcaaaaacactattcagtttattgtttaaattactgttcaatactgttcacttcgagagatattttaactttatgatctttgcagggt

SEQ ID NO: 74590 - DNA, 474 bp, Oryza sativa
tgatgcaaccttggtgcttgcaatggacatacatattctctttttctctgtaactaaactctcataatctatgttttcaatataatccaaactttagacaactatcggtgatgtattaattcctgatgccacaatactaatcaccgtgcatgcaaccatgatggaaattgtctctatgtaccatttataggctacacacctacgtaatggatcatttacgctttcatactgatatatggaggcaattcaaaccggtgctaattaaatgtttacaaaatggtataacaccgtaatatgtgaataattatattccttccattcatcaccattctatactaaatatccctcatgttagaaactactgataagcgacactactgaataatacagtgaattggacattacaactgacattctacaaatgctcttaccttcatgtgccatatggtaatccggactaatgaaagatatgtg

SEQ ID NO: 74591 - DNA, 414 bp, Oryza sativa
  unsure (1)..(414): unsure at all n locations
agcttctcttctttcggaagaagaaggtaattngggtcgtcgtgtgtacttgtagctagtaataacagaagattgtaagggtaatattaaataanataatttggttatggagctttttgtcatgttataattgtggataggtgctggcagcaaattaacaagcataacttcgtccctcggcctatggatcagctaattcaatagacgcaatctaacaaactaacttaagatagtgatgatgttctctctcatggcctaatcttcttatgagtacataactctcgttntgatcgagtttgacgctcgcgacgtggctatcaaccagaacatatccaagacgccatgcaatcgctacaccacaaacaatgtcgtaccaaccgtgacgcacagttaatgatccttgcaatgcaatcg

SEQ ID NO: 74592 - DNA, 484 bp, Oryza sativa
  unsure (1)..(484): unsure at all n locations
tagctatgtctctgtgacccanagctatctgacttagtgagctagtatgttagttctgcccatgccaagtaaaattgacttgtgcctttctggattgtaacatcataaataattttaatatgtctatgagaggtcaatgaagatggaggcagagctgcgagcattataggaaatgatggcagagcttgcacaggttcgcctcgacatcaaaagttgtgtgctgcatggcatgaactcatgggtcatgtccaggggttcacccaagacttggctcgatcagcagtggacctgcagcatgtggctgctgtaaaagctgagatccatgagataatgcatgatacacatcatttgatgttgagccttgtttatttcatatgcactctcattgttctgaaagagagcgatgtgtattnttagtcttgttgcacaaatataatctgtatattgcaaaattgttggtgctaactatttcccactgaatcat

SEQ ID NO: 74593 - DNA, 457 bp, Oryza sativa
  unsure (1)..(457): unsure at all n locations
agcttgtgagcaacgcaacanatncttcactaccacccaaacagcatgtactccagcacactacaagaaaccttgatgatgaaaaattccatccaaatgattcataaccttctgtattttccggcgtttggagggtcgccgttttcacccaacatgtggcaacacttgcaacacaaacatctctctcccctcctcccccaaatgatcgctgtcattgcacgtatgccacaaaccgaatcgattactaagcagaaaattacagggattaattgcaccttatcacatgctgatcaaaatcgctttcaccgaggattccaggctccatgggaagtaattacgtgacgtgtgtgttccaacagtggtggagctgtgctatgaacatgatgcagtcaacaactcagcatcagcagcagcagcagcaggcggcatctgatctgatctatntatatatctaaga

SEQ ID NO: 74594 - DNA, 399 bp, Oryza sativa
  unsure (1)..(399): unsure at all n locations
tcgtctggntcttgattcacttccacacattctcgtcgttataggcggcngcatctgcaggtggccgtcgggctgtcattgtccgggatgcgctcctcccccgtcgccatgggtgcgcggtggtggcctctccgcgccacctgtgtgcccctacttcgcgacgcgctgcgtcacctgctcttcgtcttcctcgtgctgctccatgcgcatgctgtgcgcggttgcgccacgctcaacggcgaatgtatacggccccagatgagcagcttgccatggtggtggtaggctggtatccgtgttgcttggtctgacctcacatggcgtcgtgcttcctgcgtgcaagaatggcgttgctcgaactgaaggagatggtgtatgctgacccccatggcgccttgc

SEQ ID NO: 74595 - DNA, 412 bp, Oryza sativa
  unsure (1)..(412): unsure at all n locations
agcttgttctctgtgtcagctgtaacaatcttcactcctgattctgatgcaaggacatctgcctcaagcatcaccctgacattaaatgctaagatggctgcatactcttctttccgcttcagcatagcacttgccttcatgacatctttcttctcaattgggcctaagttgcaaccactgacaggaacattcacaccanggctgttcaaatgctcaatgattgcttccaagattccaaaagtagaagcttgcacatagacaccttccttgcaagntttgagcctacttatttcttgtattacatttccctcttcattctcattcctctggcttttggcttcagatagtcccagatcataccctggcttactacaacgagagaagtgcctggaattgcatatttcaatccctg

SEQ ID NO: 74596 - DNA, 407 bp, Oryza sativa
  unsure (1)..(407): unsure at all n locations
agcttcacgtaagatcgagcagtgatttcagtcagtatgtatgctcaaaatgatttagttgtacaatgaatcaaaagcttaatttgcttacacttatgtagtatactcctgtctaatgataaaattattactattaattggactacttcccttcttaagaccaaatcttgggcgtccccattccatttccaattcattattacactgtcaaaattacttccttttacccctttcggcccggtcaacatagactccccagccagccagccagctttgacttcaaactgggagggggccccggtggcggtgatgcagccaagaacggatgactntgacggttgacttgcactcaacctattctggaccttttgcatttcatcagcatttcaacctggtggattgacacc

SEQ ID NO: 74597 - DNA, 463 bp, Oryza sativa
cggttagaatttctggcgatgagaacaagattgttgacttcttgatggttggtgctcctgattgttctgtgattgttcggtgcttctgattgttctgtgattgtttgatgctcctgattgttctgtgattgttgttcttttaatgtgatgctgttattcatcattgtatcatttgcagattgaagtgttgcttccaaacaaacaacgcgtataagggatgttacagcattgtaatcttcattacaatgttgctctattcagtgtgggttaccgtgctcttcgcccagcacatggtcagcttgattggtggggcaagagtagtaatgtagtggctgtatggcgttgcttcaagtcaagtgcattgatggctgcaagggaactgtaccccctggacggcacactcgattgcacttcctcgaacgtcgtcatgaaaatcacatatgtattctttctctctgctatt

SEQ ID NO: 74598 - DNA, 428 bp, Oryza sativa
tctgctttgtatatgttatgatgaccaagccacccacattcgccacagctgaagaacctatggatgctgaagattggttaaggatcattgagaagaagctaactcttgttcgagtacgcgatgccgataaagtgatctttgcggccaaccaattggaaggaccagccggagattggtgggacacgtacaaagaagcccgagaagaagatgctgtataaccaaactgggaggaatttaccacagccttccgtgacaacttcgtgcctgccgcattgatgcggatgaagaacaatgagttcaggagactacagcaagggaataccacagtacaagagtacctgataccgttcactcagctggcgcgctacgcgactatagatcttgccgacgaggaggaaaagatcgacaaattcatttgacgttgatga

SEQ ID NO: 74599 - DNA, 354 bp, Oryza sativa
actagcctcctcctactgtgtccactacacattcctctccacgtgcccctactagtttccctgcgcatccgtctgcacattaacttcctcgattaaatacatggatagtgtgcctcgttacccctcctactctgttccaatattcggctaccttcctccgcgaatgatactacaatatatgttcatgatcacgatcagacatctgttcatacaggaaacacgctgataagtcatgagacatttatgttctaacaatcttatatgctaacaatcatatatgctaagtcatatatactacgtctaactgccgatatgcgaagtcatatatgcttggccaactgtcgtattactaag

SEQ ID NO: 74600 - DNA, 413 bp, Oryza sativa
  unsure (1)..(413): unsure at all n locations
atgcttgtctgtctttgccatttgatttggccacgtgccatggataatctatactttctgtaaagntataacccactaactctaaagattcacatgcaaccataccacatcatcacccactaacaataattacatattcaacctcatgcaaacatgcaagagcatccacaatctatttaattctacaaattagcacgcaagcatattcaatcaccacatctcacatcatttccacaatagttttacaaatctctattatttttataataattaatatatacttataaacatgttctacattaaagtgcgaatttcatttggttcttgataaatatcgataagccctgagattntgatttttntctttttactcctacctgaattggaacgaaaaataatattgaaaattactt

SEQ ID NO: 74601 - DNA, 401 bp, Oryza sativa
  unsure (1)..(401): unsure at all n locations
actggtttactntatttacttaccttttactgtgattttcttactttattcaaattaatccaaaaacttgtgctattaattggataaatgtcttaactccctcctttcacttgtctttagatgccgcgctacaagcctgagtacttgtttggtgttgagggatttgtccaggagttgcgtacgatgtcctttgtcatatgatttgggactgcccctttttatgcccagattcctcatgatcgtcacgaagagaagtgccgagtcaaagtcaccttgaatagtaatagtgaagatatcccctcagtgatgttcgaagctggaggaagaaactacatccatgcatgttatgatgtggcaaggatcgccgtatgagatctccgcgatcgcttcagtgatcagtt

SEQ ID NO: 74602 - DNA, 392 bp, Oryza sativa
  unsure (1)..(392): unsure at all n locations
acagagagagaggagagagctcgcaatcgcaagcagaagcagcagcaagtagagattgggagtgtgagcctacggtgagtatgtatataggaccaggatggcatgggtcaaaatggatgggctcatgggcatcatcaccccagcctttcctgccatgaaagatagaagaagctagagagagaggcactggagatggtagatggagtaatggtggtggtggtggtggtatgggtagtggtgctgattttacttgcacaggcaagatgtgagtgaagagaggatgatgggaaaggggaatgaattgctgtcttgctgctgactttatttttgctgcaancaaaaacatattaataaatatatgtacttagtatttctcatccataatataatgt

SEQ ID NO: 74603 - DNA, 483 bp, Oryza sativa
agcttaaacccactgaaatctgaattacgtacttgagaaatattatgcagtcatgtaattctcagcaactcaatgtaatactcatatatatgacggcattactgcagaagaatatggtaaaaacagaagaatatagcgtggttaatactgatacttatgtgaaacacttataaacatgcaagcagtacttttattcaaacgacagcacatttaagcactcacattgccacatgaaccaccagtgacaatagtacaagataaaaggtcttaatactagttccaactacagcctgaacatgagtaactctagtttccctcattacagcctccatatagctcgggtactctatagctacgagttactgctaactaccattatcctactccctactgactacattattactacattagtttcatgaatatcaagcagagagcattacatgttcctggatacggtcaccaccatatgttcacattcca

SEQ ID NO: 74604 - DNA, 462 bp, Oryza sativa
  unsure (1)..(462): unsure at all n locations
atcagctcgacccgggatcctcttaagtcacctgccgcatgcaagactgatatattttgtgcnaactgtgaaagtttggagctgtgttctctattactcgcagcctggagcatccacgcacttccacatatgtcagccgctgttgcacacaatgcaacttcatgtattttatatgacggcaaagccggagtttaaccactccaagcatacgaagcggataatacgcaccccaattcatcccccgtgattctcacatactccagatgcagcctcgtcaagctttgaaagcaaccaatctccgcagtgcggtgaaaggtacagcatgaaagatcaagatgccgaatcgagcttccactcccatcagatagatgtgagcaaggaaagtcataatatgcttttgccttggacatcgagaggctgagctcttcgatccttggtgtaacagcaatttgaagccatctt

SEQ ID NO: 74605 - DNA, 419 bp, Oryza sativa
caacagaaataagccttctcgcatccttttttatgctgaacaattattctactcactatatacacttccggtgtttcaaaagaaacaaacaatacattatataacaagatggcatgtttatcccccctattcatatatgcaataagccaagacctatacaccaaatcattaacaaactatgcatgctgtttttatgagaaaagccatcatttactaattcttttcttctattctttgttaataggtttcagggaccaagttgaatgctggatgcaacatcattcaagattactaaacatattgcacataacgcagttaacagcatatatatagcagttgacaatcaagtagtctagtaattgacttgtattgtatgaaataaatttaaaatccaatatcttcatagtcacctattaatg

SEQ ID NO: 74606 - DNA, 402 bp, Oryza sativa
  unsure (1)..(402): unsure at all n locations
agcttactgttcataccatgaaatgctggacccggggattntaccagatgttgtgacctacagctctattattgctgcgttatgcaatgctcaagctatggacaaagccatggaggtacttaacaccatggttaagaatggtgtcatgcctgattgcatgacatataataatattctgcatggatattgctcttcatggcagccaaaagatgctattggaacactcaaaaagatgcgcagtgatggcgtcgaaccaaatgttgntacttatagttcactgatgaattatctttgcaagaatggaagatccaccgaagctagaaagattttcgattctatgaccaagaggggcctagagcctgatattgctacctatcgtaccctgcttcangggtatgctac

SEQ ID NO: 74607 - DNA, 379 bp, Oryza sativa
taagcttctaccttacaattgttcttgaaacagcacactgctgctatatctttttatgttcagtgatgtctcagatgatgactcaattgttgtctactgctgctgatgctgctcaatgatgttgtccttggtttgatcaagtgatcaattggatatataatccgatccgagatggttgacgcgtgaggagaggctccatcggttgccatgatcgatacgtgtatgcgagcattcatatggatggataaggagaggctaaggttcacaatcctgaaccccaaatttattgtagcaatatccttgcatgacaatgactggccgatacgggatcgagttatcactagcgatatacctatcttgtactatcatcgtctcattt

SEQ ID NO: 74608 - DNA, 223 bp, Oryza sativa
  unsure (1)..(223): unsure at all n locations
aataaagaagagaagaaggaaggagggaggaaattttgtganaagaaagagaaggagaagggaggggaggaaaaagaaaggaaagaaaggaaagtgtaaatagagaaaaggaaggagaaagaaagaggaggaagaaatagaggatgtgaggataggaaaaaaaggaagaggaagagaagaatatgaaaagagtaggaagagagaagaaagtagaaggaaaaga

SEQ ID NO: 74609 - DNA, 433 bp, Oryza sativa
tagcttcattctacacttgcagtcaggtacaccccccccccccaaataataaaaagaaaatgaaaaaagaacacctgtcttcacaccaagatttaataatgttctcattttgttcctccttacaaaacctgtgttggctatcggtttttttcttgaaatacttgccctcttcacaatgtctaaactctgaagctaatcatcgttgacactgatattttaaccgtgggtagcattgtttatgtaatctgtttgctgactggtctgctatgttggaatcagcctgcacgccccatatcataaactacgggaaacaattgtgccaagtgcaaagtcatatcccttggaggcactaatggatgactgcaagaataacttctcgaactggacgaaggtatcctcgagtcactctgtggatgctacttcctgatcatgt

SEQ ID NO: 74610 - DNA, 338 bp, Oryza sativa
tcccgcattaggaccttaaatactaactaagaagccgcattcccaaccatctcttttgatcctgacaaatataacagatattaactctatgatcaagaaaatcttctctgttatgttcaataaaaatagcaaccttggtttgttccctatcaaaccatcacaagacctgcagggattcatcattataattaaattgaaggaacatgactacacaataacaacatgtaaactgtgcatggcacacttttcatgtccactattaatcttatatcttactgtctaagacaagttttatttctgcgaccacgtagaatacttggaaagttgttaagaattta

SEQ ID NO: 74611 - DNA, 395 bp, Oryza sativa
agcttgtctttactatagaactggcatcccggtatagcaagagatcgccagatctgcatgagtgcaaacaattgtaaccgacaatactaatctgcatgagtgcaaagaattaactaataccagtatcaaatttagtatttatttaaagcttaatggctaattgcacacctgcattttcagtaatctgaacatgacaacatacttgtgtgtggattctgaatttctgagactgaaattggcattggtgcaagcagcggagaacaggtgggcttgaacacgagcaacaagaggtctcagaagtaagagcccaatctaaaacggcccaagataacgacccactaacgtgccaatataaagcagcccaagccgccagccgcctgtcgaaacacccaccg

SEQ ID NO: 74612 - DNA, 401 bp, Oryza sativa
  unsure (1)..(401): unsure at all n locations
acctcgccactcctacaacacttggtattgtctcgttacaccttcatgtgcgacattcatcatcagctccctttccaaccgccaacaagacttgatgctaatgggcatggagcttattgggtcggaggtatatgttccctgccgtggaacatgttgtgctccttcatggtgtcactaatggctatctcgttcaacatgtccttctggtccactaaatgcatgtgttgctacttggattgagttttggtgcctcctcgaatcttgcatatgaaatgtgccaacaagcatctctttccatgtccccgagcangacctcgctgatgctctagtggtgctcctcatccttggattcctagagttatggctctcgtggaaccaccagatagccgccctcatcactc

SEQ ID NO: 74613 - DNA, 408 bp, Oryza sativa
  unsure (1)..(408): unsure at all n locations
agcttatggtcaatatatgtatggagttgaggtatgtatgcgagtggaatgagtacaggtggaaatttttggtgtggctccttaaaaggacgaggttggacttgcatccggagttggtgatggatttgtcacacacgaatgagctggaaaccaaacccacgtacgatgctagccaatccagagaagaagcctctgctgcagcttcagcttctgatggacagggagacgataaggaaaggggtgacttgcaagcagttgaagcctatggttctcctcctggtaaggaaaagggtgacttgcaagcagctaatgactcttctcccactgctgagaanggaaagggcaagcatattggatatgaagcacagcagaagaaatacagcattgaagatgttaaatcctcaagtc

SEQ ID NO: 74614 - DNA, 452 bp, Oryza sativa
  unsure (1)..(452): unsure at all n locations
tagatgtttttgttccattctgatagatggtcaataaacggttacacactctcctatggtcctaccctattaccctactatatggacaattgacattatgatgatgttctaaaggcacaacacatggttatatatgcacgcaagtgcatttgtgaaggaaaagatatttggttataaaagcacaatactgtaattaggccatcacaagattatctcttatacaccaatgtactagttactcgaagtgaatttatcacgcctatgtaaggtattttcagctcaatgcaaaactacttgcatattaagcttggattgtggcatagcattggattaagcttctgcaggttatcttgtcgctntatagctaatatggtacctagatagtaaggagctcctcaatatgcagttctggttcgggcattttctaccatctgcatctggcattcactatt

SEQ ID NO: 74615 - DNA, 402 bp, Oryza sativa
  unsure (1)..(402): unsure at all n locations
agcttcttattaaatttcacccgactaacagtttttgttttcacaggactgattattcagagatattgtactgcacgtcgcgacgacagctagaacccacttccacaatcttcatccgtaaaaaatgatagaaactcgtccatgctcaatgcacatatataattcaattactttaagaaagaaaggtttatntcatcttcctttnttgcatggactaataactagcttgtctatatatacaaaaggaaaacaacttgcatgatgaaaccagctagttgaaataattaaaagaaaatcagtggacaggattggactgaatttaaaacgtgccatctgagacaaggaatagttacgatatacagtccagtaaaaaacatacgacattgttaattatgtactccc

SEQ ID NO: 74616 - DNA, 462 bp, Oryza sativa
  unsure (1)..(462): unsure at all n locations
atgtcagcaagtgtaccccatcgccaggtaagcctttcatccagttaaccctctcacaattcttttgctcatataactcatggatcttgtcgatgatgctacacaggttcagaaaggaatcaaacacttcgtaaacgataacgggctgctgaaatctgattcggccgacaggttcgcatggttcacggtaagcttcttcggtagtgtaatctccctcctcaattacgcatcctttggaacacatgaatgttacacagaattgtgttcataccatataaaaactctcaataatccccccattccggtgggcttttgccatgatatgcaactctcctgcgcattcttggaaaaacaatataacaaacagaaattatgttctcatgctcttccagatctcaccgtnttgagctgtttacactatgcatgcatcagctttggtcgctctaccgatgttctacacct

SEQ ID NO: 74617 - DNA, 355 bp, Oryza sativa
  unsure (1)..(355): unsure at all n locations
agctttattatatctaactaattatgtaaataaaaacaattntaatcacctaaataaaacaattagaactgcaattgaaaaatctgttgccagcttggttaaacatgagccggcgggtgcgtgtggcatatatctctcactcgtacatcgtggtaaattttttacatagaaaaaatgactgtgcgttgcaattataacaaatataaaaatattatatgattaagggttagttttacatgatatgagctctttaagaaaatatattcataatgaaataaaaaaaagttcagctgaagggacctaaagtgaacttattccacacagagcgtacacgcggtccatgatgtgtgccaat

SEQ ID NO: 74618 - DNA, 465 bp, Oryza sativa
  unsure (1)..(465): unsure at all n locations
atttctccaaataagatgtgaggtcatgccaaaatttcttgcgaaattnntttagtgataatatacaaatcggaggtgtctaaaaggttagtaacttcattcttcaatgatttttgttgctataatactttcggagctatgtttcacacattttttttttgtctctaaaacgttgttgtaagttgatgagagagaaaattcttgtggggaagatgaatatatagaatttttgtttgcttacttaaaaaagtttattctcatatgttaaaatataatgataattaatcttaaaaatagaaaattaaataaattgaaaattaaaagaagtacaacattaatattagtgtagaacttcaaaaataatataatacaacatttatattatgttagaacttcaaacataatataaaagaattgttgttggataatttatattattaattgtatagtaatgatatgtcatta

SEQ ID NO: 74619 - DNA, 196 bp, Oryza sativa
ttctctgatgttttatgcaccaggctggactagagcgtactgtgttcgcttatccactcgtgctttattggacctgaaaaaatgcggattcttttctcagtggcctgaagctacatttcgacttcggtatttcaccccccccccctaacaagaactaccttgacttggatgggtctggctctggaaacgtaaaagt

SEQ ID NO: 74620 - DNA, 186 bp, Oryza sativa
aagagagggaaggaaggagaaaaggaagaaaaagaagggcgaaagaggagaaggagagagggagaaaaagaatggggatggaaaagaggaagaaggaaagaaaggaaaggcgataaaaaaaaggaaagaaggaaaggaaaaagaaagaagaaagaaaaataggaagaagagaagaggaaaagagga

SEQ ID NO: 74621 - DNA, 447 bp, Oryza sativa
tactcagcttattatgcctcccgaacttgaacgcgtgtgacatcatttctctgtctaccgggtttgacttatccaatttgtttgataaaagatatggccggagggaagagagatttaccactaggcaaccggcggcagctatatttgctaagctaaatgaattggccagacgcttcaagctcaaaattaagaaaaaagaaaatggggttctgaggttggtagcaccaaaggaaggaataaaaggattacttgagcttgatgctgaggtttgtgagcttgctccatctttccatttagttgaatttaataagtccaatggggacactatagaatatcaaaagctcatgatggaagatataaggcctgcacttaaggatatagtttgggcatggctaggaggtcagcaccagcaacctgagcaatctatgcaaggaatgcaatgagagc

SEQ ID NO: 74622 - DNA, 392 bp, Oryza sativa
  unsure (1)..(392): unsure at all n locations
ttgcttactcgaaggaatctcggagcacggatgttagtaactcatgttactggaccttgagctgaagctactatcccactgtggcccatccgattggaaaaatgacaatacaaaagaacaagcatcagtcagggagaggggatcgatcgatcagaagaaccggacggcggcggcggtggcgacctggaggccggtgggctccttgtcgatttcttctccaccattcctcctacctccatcctcttacttctagaaccccttctagaacttgtatcccttttcttcttcccattttctccaccaaacaaagagttgtactgaatattngttgcaattttgcttatagaagtgggtctctaacaagggtctatggcattcggtggtggtttggg

SEQ ID NO: 74623 - DNA, 459 bp, Oryza sativa
actgatggatcatagaccgattaatacttcatcggtcacttgtgaaactatttcggttacacctatgctaagaccggaattgttagtaattctctccctattaatcctattgatgttgataaaaagaaagggaaaaatgttattgttaaggatcctcggcccaagacacttatgatcaataatgcgaaggccgaagatcataaagttgcaaaggatgagtcatctattatccaaaggaccaaaaagccgaagctcacttttgatatgcttatggctaaatacaagaaaggattagccggtcaatgatttgacaaccaaactagtgattcgaaaagaccaagatcatctcgtatgaagagatttggtcaaacatcaaagcaatcggagccatctaccataccaactccatataatacctcaattgtgatgccatggtatccatatccaatgtcactatat

SEQ ID NO: 74624 - DNA, 419 bp, Oryza sativa
agcttcactaagtatattaaacacccacatgagcaacattgtgaataagtagtcagtcttacatgctttgggcaaacagaaacacacactgtacataacaatgaacttattaacttatactccatttgttgattgctaatagatggaataagataatttatcagttcttctgtttctttcccaggaaagtatactcctcagtacaagtggcttgaagctgagtttcccaaagttaacaagagtgaaacgccatggctgatagtgctattgcatgctccgtggtacaacagctataactatcactacatggaaggtgaaagcatgagagttatttatgagccctggttcgtcaagtacaaaagtgacctcgtgtttgcaagacatgttcatgcctatgaaccgacagtaagcacttacag

SEQ ID NO: 74625 - DNA, 459 bp, Oryza sativa
agcttggtgagcgccatgagcgatggatggcacgacaccaatgtttgtttgtggcaatggctgacgatggagctagctatgtcgccagggcgcttgagacgaattgcatgccgtatctcgaagctataccgctctttatgtaggcgatcgagtgagctcaaatgccaccacactgtgcagctatgaccgcggacacgcgcacgctccactactctaaatggatcgggaggttagcacgcgtcattgcattatctgcaagtaagcactgtgaatggccaacgggtaattgcggcgaaaagctacgcctaattcgctaatcaagagggcgtcactcctaacttactcatgcgagagtagtttcctagcttgtcacccgttgctcaattggctggacttctctcctttactcgttattaagctctgtgctcttctatttcgtgagctacaggcttaacgttg

SEQ ID NO: 74626 - DNA, 427 bp, Oryza sativa
agcttgcacagttctttgaatggtgcacgatctgcagacaaacatgatatagagatcaatggtgtcatgacggtgtctaagataaaatacttgcatctcatgtcaaaagttattaccacatactagttgccctgtgtcagacgagaacaaaagaaacgttgattgagattattttattaatttgaacacagaaacgctgtaacattgggcatataagctaaaatagctcttcattcccagaagtatactcatgaacttcaagagctacattttcaacttagttgaagaatgtttctccacctgaaatctactctagatgatcaatcgcagatcgctcattctcacaaattaagctcatgagcttcataagctacattttaccaaccagacaagagtgcatgtcattctaaaatctactctatgatca

SEQ ID NO: 74627 - DNA, 358 bp, Oryza sativa
gtggatgcctgccgagttaactgggaccgaggcggcgatcatggtctttgactggtctaatacgttgacgacctgctttggcagcacttcctgaagtagagtatctagaacggtgatcgctgctaccgcgttctgctgtggggtgcgactaaccgctcgactctctacatcaatgttgagctgtgagagcttttgctcgccgtccagcctccaatgcgcgttgtcgtcaagtctcaggcttcttcgtgagcccgctcgcgtcctgctgctccgctgcaacggatagctctcggctaatactcctttctaatcggcgacctcggctccatgcatggcgttgctctttgcttcaccgctt

SEQ ID NO: 74628 - DNA, 406 bp, Oryza sativa
cactcgtaccgggatctctatagtcactgaagctgcaagctaccggctggttttttggccactgcagtgccgacgccgcaaaattggcgcacgtgcgaaagggccaattttctccagacaattcatctaccagctcaagagtgcagaccatccactgtcttggccgttgcagttgggggctcgacatggttgcccattaaaaagcagtggcggtacagcaccttttgtggcattgcaaattctcatgaggatgaactaaccggtgtacaatcacagcagatacgcttagacttttcataacattgtgatagattggagtgccaactgatatcctgacatggagacaataccggggagtttaaaactttggaaacttggaacaaattgtatgctcatggcatccata

SEQ ID NO: 74629 - DNA, 475 bp, Oryza sativa
  unsure (1)..(475): unsure at all n locations
gacctatgaaactcagctaaantaaggtacgccttctctcccaggctcgatatgaatttactcttggcggccatgcaaccggtgacgcattgcacatccctaagtttgctgggggggcgcatccgctctatatcccgtatcttctcggggttggcctcaatgcctcgggcagagaccaagaacccgagaagcttgcccgcaagtacaccgaacacacacttatcggggtttagttttatgcgggcggagcggagactctcaaaagtttccgctagatctgtgagtaacgtgtcctggttgtgcgtctttacaaccaagtcatcgacataagcctcaacattacgtcctaattggctacccaaagaaattccagtagtacgttgaaaagtatgacctgcattctttaacccgaagggcattgttgtataacaataggttcctatggtggtaatgaacgcagtattttcctcatcct

SEQ ID NO: 74630 - DNA, 434 bp, Oryza sativa
agcttgatggtctgtacatcataacggaagtggaagaagatggacgtcctattgccccggccgaagccgccaagaactatgtacgtcacagcggttgggttgtgcgggataacgtgcctgtcagtactgtgtactggcgaagaacaaaggcacgcggagatcatgagagcgttgtcccagattcggagaaagagatgctgtggaccaaacttgctcgagacattcacccttcctgcgggtacagaggacaaagtgaaaaggtggactctgaagaaaatggcagaacagtttcagagctttaagggagatctgtaccagaagtatatactgaatgggcagacaccgaactttgacacatttccatagcttagggatcactgtgacgagttctttgcatataatacaggtgaacaaaggaatgcgatgatggaaat

SEQ ID NO: 74631 - DNA, 421 bp, Oryza sativa
  unsure (1)..(421): unsure at all n locations
tgaaggtcggcacatcataaccgaagtggaagaagatggactttctattcccctgcccgaaccgccaagaactatgtacgtcacagcggntgggttgtgcgggataacgtgcctgtcaatactgtgtactggtcgaaaacaatggcacccggatattatgagagctttgtcccagattccgagaatgagatgcttgggaccacaatgctcgagacattcacccttcctgcggtacagatgacaaagtgaaaaggtggactctgaataaaatggcataacattttcatagcttctagggagatctgtaccaaagtatatactgaagggcagacaccgaactttgacacattcccaaagctaaaggatcactgggacgaattcgttgcatataagacaggtgaacacaggaaagcgatgatgg

SEQ ID NO: 74632 - DNA, 417 bp, Oryza sativa
tagcttgttgttttatgcttctatctgaattacactactccatgtaattatactgtatcccccttcttcgttagaaataatgtcactggtgttccccctttttttttaaaaaaaaaagcagattcaacatgaaattagcatctataaacttgaaatgtggaagaagtgcagccaaaactcttaaaagacatgctaaatcccgggtaaaaacgtcttcagaatgactccaatggctatagacagtcattgtccagagcatgatagacatgagcttcatgatacggcagccacagccatcatcaaggggagcatgcctgaatacaatattagcagcagatgcttagctcaagcgtgcaaacgtttgctaataatctcttaatagtttaacaactaatcacatcctcttatatacttaaa

SEQ ID NO: 74633 - DNA, 460 bp, Oryza sativa
  unsure (1)..(460): unsure at all n locations
ntattacgagtggtagctgggccaaccaaaacaccaacaaatatagcctgctcggtccgaattccgaggcgatccccccaccaatccgcgtgccggccggaggagctcgcctgtcgcctccaaattcatgccgccgccggcccactgcccggccgtcgtcgtcctcctcggaatccccagttacatatatccttctccatttccatacgtactcctactactgttgctgccactatttgtagtagaagaagaagtattctgatgctctccaatggcggcagccactgcatggctgggtcagtgagacagtggcacgaaatctaaagcacatgtttggttctggagtccattcacaaggagggctatctttggtctttagctggcgttgctggttttgggacttgttgagagtatagcgtatctcagccccttcccgctgcttggagtttgtatttagccg

SEQ ID NO: 74634 - DNA, 372 bp, Oryza sativa
agcttgttagtatctgtaaattattagattataaatttaccgtattcttatgcaaagttcgtagcttacaaagcttaatggaagcagcttttcctaccacttgaattgacagtgtattttttgcattagattctttaccgcgcaacaatacattagtaggtttgacattaatgctaaaagttggcaatgtgaattttcttttgggaatgcaaaaaaaagggtgctctgatatcacttgggcatgcttccatgttgttggattagtttcacgtgcagccataatcacccatacagtgagcaaagaccatatagagtgtcatttttctccccctagcccatatttttctcatcattcccacctcttgtattctt

SEQ ID NO: 74635 - DNA, 453 bp, Oryza sativa
  unsure (1)..(453): unsure at all n locations
gcactccctctataacattagaaacaatcatcattttatttctgccaatgaaaccccactctcctagcaaccaatttatcttacgggccgattaatgaatttcacaaatcccttcatgtactactctcctagcaactttagttgatcattatctaagtaatactccatctattttttggcgatataatatttgagcacttaccgccgaatcttccgatcaaccttaagtgtaggatctttcaaaactctaatcaaaggaattctccaagctatttctaactcatgggcacaaatgtccgaattcacaattaattcagccttttaatcaattgtaacgtgccccccagccttctgtctgggatcggtcagaccggccacgcaatgccggtcagaccaccctgtctgtccggtcaaaccgaccatgcagagccggntagaccgcatgtcaccacc

SEQ ID NO: 74636 - DNA, 377 bp, Oryza sativa
tagcttatgaacgaacaagagaaaagagagaaaaacttctcccattgctgtggagagggagcttactggtcacgtgggggtgtgagaagagcaagtttccgcgtacatccttggccaaagacatgagcgacctgcttctcgggctggcttggctctggcttggagaaagtgtactgatccatgtcggcagtgaggaggattttgtggagatcgtagtgggggacataatagtattcctcccaaaggcattagctgcgtacttgggatgtcaccaagcccatggacaagctctaacttgaagtcatgcaaagcgacaggtggtttgcacgctgaacgttgaacacagaggtgtcaccgactagactcaagatcgagca

SEQ ID NO: 74637 - DNA, 397 bp, Oryza sativa
  unsure (1)..(397): unsure at all n locations
agcttatattactaattaccattaatgnttaatcatatcactctatatgtcccttgagagaaattattgcatcctaactgattagcaaaatgcctcgtgtgtcagatgaacctctgacaattacttacagttactgggatggcactgggcataagagaagtatccaggtaatctctaaccattgaaaaaggtgttcctcttttgattgttctgaacatgtggaccatatgattgaaacaacacctatatacctggcaggtccgtaaaggtgactccatcggagaattcctaaaggctgttcagcagcagcttgcccctgagttccctgaagtgcggacaacatcagttgagaatcttctttatgtgaaggaaaatcttattatccctcatgtatgca

SEQ ID NO: 74638 - DNA, 445 bp, Oryza sativa
tggtgtatgtatatacatcaatatgtgggttgtgtttcctataaatattatatgttagaattccacagccatttgtgtatttcagcacgtcagattggtgctatttttcaatggcaccagtgactcgaacgcagtattatttccgtataagaaagggcattgttgcagcagcagcagctgttgatgatgatgatgctacatggcgatgtgctggatggagaaagtcgcttgcctgacgaagcacagtatgagcagttatgttggctgtttcctgaatctgaaactgaagccgttagaatattcagatatgcatctgcgaaattcagcttcttgctttcaggtttgctctacctttggatagaaattgaaaagagagcgtggctctcgcaagattgcaacttgtccattgactcttgagtgcagagatgacgagttgcagaaagca

SEQ ID NO: 74639 - DNA, 413 bp, Oryza sativa
agctttctcaaagaatccagctatacagcagagttcgaaaataaacttagcaaatcatatgatccatgacatgaacatgaactctattagcaggccaagtgaacgaacatattcaacagcaaacatgggaataacttacagtagaaatcatttggcacatgattatgcaaactttctggagaaaaacttaaataacttgtctcgtagtcctggtcctagttctacaagagttttgagcaatgacagtagggcatgcatgcctgatgtacctcacaaaataattcaagatggttcaagtagagcatcaaacaccgaactgaagctggggcaatcatcttatcatcaatctatggctaccctatttccatcggtgcagtcgacaataatcgaatttcagaaacctcagcaccacc

SEQ ID NO: 74640 - DNA, 449 bp, Oryza sativa
  unsure (1)..(449): unsure at all n locations
ggcggagatgcanatgcgtgcaccgaacaggaagatagttgtcatggactctgtttgagggaccataaggggagctatgcacaggcaactgatataaagcatagaggacattgagagtttgcgcccaatcttgtccactattgccgcagatagtataaggccaggaacctctgcaacagtgtgatatgaatgtgattacatgaagtagaacattctcaagaaatatggtaaagcctaagggggaaacacatgtacctccaaagctagtgatgaacacgtttctgtacagattagcatcgtttgagtggtttgtttgcattgttactatcccctctgatccacaaatcttatttccatgactcaattccgaggttagtagaacaagaccgtagtataagaaggcatgaccaagaaagacagtccaaagaagaagactagatcttattaaa

SEQ ID NO: 74641 - DNA, 318 bp, Oryza sativa
tgcttacctgggttgcctgcgttgataccctgcaacgattcacctaacatcaaccagcattaatatatatcgatctccaccgcaatcagagaaatgacaaggatcacaatcataactcacctggtggattgacgggtcttgtggaccccaatcttctgggtcctggtcgggccatgggaggctacctttgcagtcgcatcctctgccttagcagccctggaggcggtagtcgccagcctcgtcgtcgcttgaggagtcccgggtgaaccccctaagcccgtcgggttcttctttcgggaacttggatcagaggtcacc

SEQ ID NO: 74642 - DNA, 421 bp, Oryza sativa
tcgcatcccctataatattagaagcaatcctcaatcatcctcgggcaatagaaccccgctctcctaagcaaccaattcatcttgtgggccgattgatgagttccacaaattccttcatgtacctctcccatagctactttagattgatcttcatctagacacttcaacaagactctatctatattttggtgatataaatcttcatcaagcaatgtgtatttgaacgcttgccgctgaattttccgatcaaccttaagtgtgggatctttcagatatctaatcaaaggaattctccaatcctcctctgtttcctaggcacaaatgtccgaattcacaattaattcggcctctaaattgattgaagcgtgccccccaacgctctgcccagaaccggtcagactggccatacaaagccggtcag

SEQ ID NO: 74643 - DNA, 334 bp, Oryza sativa
tagcttctatctaactgggataagtgcctgcatctagacaactgcttgccattcccgccacatagccaaaatcatatacgataatgatgttattgctttgtacgatgcctaaaaataaagccatataacagctcataccgagcatgataaaatggcggcgaccaaagcgatcggattataattctgctaaaagcaagacacttaatcgaccaatgcccagtatgagataactatctaaacacccgcggtattagtctgcctaagtgtctccagcgaggccatattcaggctcaatcataggacgcccataccatgctccatgttattaatatca

SEQ ID NO: 74644 - DNA, 444 bp, Oryza sativa
  unsure (1)..(444): unsure at all n locations
ctcgccacagccacattcattctgggctttatggttgngattattgaatatctgattaagtccttcacgaacgaaatcgacttccgtgccatcaataaacggcatcgcttgcagcgggacaaacagcttcacgccgtcgtgttcaaacagcagatcgtctttgtccggctcgctaacactgtcgagcacatagccaaagcccgcgcagcccgtttgcttcacgcctaagcgcacgccgaccatacccggctgctttgccaccagcttacggatgtgtatcgccgctgcgggtgtcagcgtttagccttgccaggcgaaatcttgtgggttaaaggttcctgaatgcatgtccatcgatttacctcacttcatcgctttcagcgtataacagcatgttagtgataatgattatcagctcaacccagcagacccacgggctttacc

SEQ ID NO: 74645 - DNA, 431 bp, Oryza sativa
agcttatactatataaattataaattaacttcactttagccatgtacaaaagttagagattttattgaagagtcattcaatctataagctgtagatcaagtatagacatgtcgtatgatatcgacatatttagaatatggtaattaccatattataagaaacggtaatttccgcgagaatacggtaaatacggaaacgatcggtataacagcaaaaccatttccgttttcatttccatatttttttaccatttccatttttgtttcggtcgattaccatttccatatgactcggccggtagaaagtcgaaaacgaacgccgatcggccggtaattaccgttaccgttttcacccctatttgttagcacggtagcatcacattattcgttagcacctgagattccattgatcataactgataggatgaggag

SEQ ID NO: 74646 - DNA, 331 bp, Oryza sativa
  unsure (1)..(331): unsure at all n locations
acactgacatgggggcccaccatattggaagaatctgaccangcgcttgcgctccncctccctctttcttcacaatccagatctccattattactacctctctcttcttctcccacaagtcagagaacgaaggatccaatacttgaaaatggaaaaataaataaatcaaaatccattccccttctccttccccaaacacagagtggtttgcacgcgacttcttctccctccgtcgccgtcgtcgtcgcaactagacctctagcaatggagttccgcatcgtctctcgcctccttcgccgctccaacgctgtgagccttcccccctcccccc

SEQ ID NO: 74647 - DNA, 344 bp, Oryza sativa
ttcttgatgtgccatgcactcgctggctatcgccaggcgctatctagtcctttgcgatctacctaacagaggatggcataacaacttaggccattcccagtcgagtaatgtttgaaatccaacttttgtcgttaaacacccacactgtgcaattggaacgagctactagtatctaccagaatttcttacctccggcatatacgcttatgcgcatctgctgcaagtcaaagacgaactcggataccacactgaattggttcttagcatatcaccatcacaggtacataacaatagtcgcatgggctactcatggccaccctgaattacgtaatctcgcactaaat

SEQ ID NO: 74648 - DNA, 105 bp, Oryza sativa
gaattttttcacaccgaaatagtctgcctaggctggacatcgcctgctggactgcacgtttacaagaacaaccaccagaaccttcaaagctgtgaggtaatggaa

SEQ ID NO: 74649 - DNA, 448 bp, Oryza sativa
  unsure (1)..(448): unsure at all n locations
ctttatttggctagttctcgcnaataaacaagttctcatgtttctcaacgcagcaaccgagaagtcgaaccacatctcggtgttgtagtatagcaatcagagtgacttcatttctaaactccactattccctgatcagagtctctacttaaccttttcacagcaaccttctagacaaccttgtaacatccccttttgagaaataacaacgtcatgttaatgcacataaaaagataattagatgtttatgctccttgaagaggtataatattatatagactttctagtgctaatttgtggtaacgagtcctgctcatggactctaaaaatccttaaaattatattactggaagttaccttatagactttaccaaaaccgccctgtcaaccatgaatgatttggagaagttgattgttgcagccaccatatcatcaaattttacaatgga

SEQ ID NO: 74650 - DNA, 344 bp, Oryza sativa
cagtaagccaagtacaatagcaggctataagtcagctacaaacatattttaagaagataaatcaggagagagaagagcagcgggctacaaattaatagccagctgtagcacagactctaagacgcagtgtgtctataataagtgggactagaaattaatagtggaatatggaattaacgtatgaatgagctattaaattggttataggataattgaagctagtagttgactatactattgaacttgctctcaccgcgatgagtgagctggggcagttaggaatgtcaatcttggtgcacgacattgggagcagagaatgtgagctcaccatcagtactctagcg

SEQ ID NO: 74651 - DNA, 445 bp, Oryza sativa
  unsure (1)..(445): unsure at all n locations
gacactctannaaactcanactacaagtnnttattcttgctccagtctgggagattgcgtagtgtaactattatctatccctcctaacatatacacgtgcaatcatattgcgcatctgagaaaaataaacacttcacatgttccaaaatataatcattaatgaaagctcttaaagaaaccaactttatggtgaaaaataattgtaattggctgagggtaagagttaaattgagaaattggttgaaatgagaatctgtatgagaaagcgcttatattgtggtataaatattgaatccttaaaatcttatattttgaaatgggcggagtattagtactctaaaacagaatgccttctccttatgcccaaaaataagtgttactcttttatttactctctggtcacaactaagattatgaggtctacttcttattaacccctacatgt

SEQ ID NO: 74652 - DNA, 414 bp, Oryza sativa
agcttatgttttgtaaaaccaacgagtacgccaaagctgaagacgccgtcaccgcatcaaagcagtcgggccccagttggaagcaaaacaagggtacgccggctactggaggtggtggaagtaacaatcataaagaccgcaagcgtaagcctgcggaacttgttgcaaccgccagtcactcttctcgacagcgttcgcgcgtcaacacgttcgacaagatcatgaactcccaatgcccgcaccatcctaactccaaccacgtggccaaagattgtttcgtctacaagcaattcgcggatcaatacaccaagactgcacggaagaactctgacgaagaacaaagcacgtcgaggaagaaagacgacagcgacgccccggcaagatttcaagaccaccgcaaggagctcaaccata

SEQ ID NO: 74653 - DNA, 455 bp, Oryza sativa
  unsure (1)..(455): unsure at all n locations
ttgggaaaagttcttcatggtatgatatctacgctattgtaataaagatcttaattgcactctttactcattgatgattaatcttgcattatgtaataattataagtagcactaatttcttcttatcaggaatgcatgttattgatttttgttcacgttttattttctggaagagcttcatgccaatctcatgaaagttataagatatgctcacttgctgaggtgcacgtggatggtactgaatccagatacttgggtgtactttcaggggcatgaagacagatataccatatatgtacatgcatcaagagaaaggcctgttcacgctagtccgatatttaatggcagagatattcgaagtgaaaaggtaatttgctagatttgatttagaggtgacctcattnttgcaacaatacgttntctcactgtctctagtacattttgccccccaaaat

SEQ ID NO: 74654 - DNA, 422 bp, Oryza sativa
ttctttattatttggtgggttataattctatagtaagaggggattgtacttctccccccttgtccatggccccattcctgagcttccccatacgccttcacccctgtcctctcctcttcttccaccctcacctcttcggatccgactactttgcctttagcgtataaggcagaggtgcacagcaaaatttgtttgcgtttggaggtgaattgtgagaactttaccttctccaatgcaaaacggagtgatcaattaatatatgattaactaatcttttctgtattttttttaaaaaaatatatcatttaacagttcagaaagtatgcgtgtggaacataagagagggaatacaagttggggaacagatgctaaaagaacacaccctaactcaatatataaccagttagtgcgatatgggtaca

SEQ ID NO: 74655 - DNA, 395 bp, Oryza sativa
agctatctcattatatatataattggtgcagtctatcatcatggcccaatcgaactacaaaatgacagttatatcattgttgttctttcttaaaaccgcgcacatgttctattatcaataccgggccatgataaaagctattcgctcccttctaagatataaatactctctggactccaattctatatattatataagcatttttatgacactgaccctagcgctgggaattaaacacttttcagctttctattgcttaggaagggaattgcctagtaatttaaaaatcacaattggaccaagtctaaaggaaatatttgcaatatccttactcttattaaacaactaacaaaaacttatatttatgagtgattaattcggattaatatgaattt

SEQ ID NO: 74656 - DNA, 419 bp, Oryza sativa
agcttggtataagcattaaagaagatgatggtagagtcaaagatgatgaattgaacaagaagaagaacatgaaggagaatgagaagaagaagcattgcatgcagtggttaatccaagaactcataaaagtttttgatgaaccggaatatgaagatgagggcaaaggtaagcaagttgttgatttagcttttattgctcgtaatgcaagttctgatgttgatgaatctgatgatgataatgaagaaaagcttagttatgatcaattagaatatgctgcttacatatttgctaggaaacttcaaacatgttctattgagcttgatgagaaagatcatactactgagattcttaatgctgaaattgctagattaaattctctgattcctaatgatgataattggtcaatcttgtgaagttta

SEQ ID NO: 74657 - DNA, 446 bp, Oryza sativa
  unsure (1)..(446): unsure at all n locations
gacaagatcggagacaacattaatgtcaagttagattgctttgcttctgctcttcacaatcagctgagctttaacaaaatgatagaaacccagctagctcagttagcatccttagttccttcaaatgaaactgggaggattccggggcaacccaactccttcactgaaaatgttaaggcgatcacgacgatgggaggttagtccactcgtgatccgccgtatcctaaccctgcaggaacaaacgagattgcaaaagaagcgccatcttatgactcaactgacaatgaaaatcagccagaaaagaccgtacagcaggagtactacgacacacaatngctgctgtttccttaaccgatgaagaaacccgcagtggacgagcaattcgctcgttttgttgagtaatccagaagatccacatcaatgatccgttagtcgacactatgcaa

SEQ ID NO: 74658 - DNA, 389 bp, Oryza sativa
atcttattactataagcctgtcatgatatacataccatcgcaccatgtaactaagtctacttgccgcatagctcttacagcccaaaagtagctgcatgtacgcataactttgtctggccaacaatatctctgagaacagttgaccgctctcatattgacatgcgatcgtcttatttccaaacgtgtgatgtagaacacaaactatacttctgtgattaatacggctgctacacacaaagagtatatctatagctaactattggacctgtttcaagcctgatactatatatgccctcacctactaccatccttgacgtgaagtaagcatactatgtacgagcagagtctgtagcagtacaacaccctactactatataatttggtcgatt

SEQ ID NO: 74659 - DNA, 431 bp, Oryza sativa
  unsure (1)..(431): unsure at all n locations
ttgcataaacanaaacaaaatcttaacaatagtgttaagattcatactatgcgctaactaacctaagctgctaaaatctaatcttggtgagtggtaaagaggaaaaattcggagagatgacgatggtgatgatggggtcgctcgcgcggtgatggacggatggcaacgtatgcacgcgcatccgtgtcgggggagagcgaaaaaaagttgttttctcttctttcttttggcggttttgcagcggcgcggcgtgttgcggaggggaggatcgattgatatgggtcggagcggctgtccaatccggtgctccctgccgtttctttcccttttcctctctctctctacttctctctgcctctgcttgctctgctctgtatctgtgaccatctcgcttcgtcatctcgtcgtcgtttgtgttcttggattgggtt

SEQ ID NO: 74660 - DNA, 139 bp, Oryza sativa
agcttggtctcgattaatcatgatcgtgatagtagcgcagacttcaaaacatatataatatacaagaatatatatatatatatatatatatatatatatatatagatatatgtatatatatatggagagatatatatgt

SEQ ID NO: 74661 - DNA, 422 bp, Oryza sativa
  unsure (1)..(422): unsure at all n locations
taagccaagctaagctaggcagcagcaagaagcataggcgataagatgatttgggcgtgaccactgcggcgagctagcgagagccacgccgcccacggcacgcggcgacaataaattcttgtgcttggctcgacttggattttttcgacctaactagtgctactattgcttaggagtatgcatgtactatgcccacttcatccagtggttggggttcttgcgataggtgagaggtcacaggaggatacatgatagtagtagaattgttacggatttcgcaaaagaagggttttaattagtgtcctaatcctagaggggggcttttaatttgtactagcaattaattgtctagaaagagaaaaaaaaagagaggtttgtaattaaaggaggcgcttntatcacgagatggtgagataggatca

SEQ ID NO: 74662 - DNA, 412 bp, Oryza sativa
  unsure (1)..(412): unsure at all n locations
atcttgtttataatcagagtacccaatgcttcactttctacatcctctgcaacaataagcagaggcctttgcttctgttttagcagaaattatgggccatcagattgcatagaatattaaattgcaaaatgaggtcataacaacaaaatatcagctacactaataaaaaataccttcagagctaactccaacactttcaccacagcatgaaggttggacactttcttgtcatgtatcaagatcagtggatcgtctagttcctgtaacagatgaaatatattacaaccaagataatttctgttaaagaagtatattaacatcagcagaaatacttacacatttctggttctttttgttggtaatgaagtaaagagagatatanacctctgtcaagtttcatgccttctacaac

SEQ ID NO: 74663 - DNA, 424 bp, Oryza sativa
acctatcaaactcagctggctcttcgtcaaatattttagaccatgccatttggttgtatggcgggaaagcataaatcagtagctagcttacatgcttgtcatgctgcccaaataataccattccatttcagacctcaaaggagttggcttcagtgcagaaaaccacagtccacatgctgttggctttaaacagatgtggtcacagtttgtattctggatgaatatgtgggagaaacatctactgatcgattaatcaagaatttattccatggaatgccacataatcaaatatattacttttcctaatgagataacaagatcttaattcctctaatgaaacaacttttctaccattctaaatccttgacaatggtctacccagatacttactccgcttcatattctaaaactgtctatccttgcc

SEQ ID NO: 74664 - DNA, 207 bp, Oryza sativa
tattcttcttaagagaagagaaaagttcctagagccatacccgaactctttcgaaagctttcggactcctgatttctactctattcctattccaccagctagatactactaaactaaacttgagagaaatgagagagctattgcttgatgtgtgtgtgtgaagtgagaaaaggaactccttttatagcttaactatgatggttgtga

SEQ ID NO: 74665 - DNA, 447 bp, Oryza sativa
  unsure (1)..(447): unsure at all n locations
tatctagaagtgaccgtgttcaaagagtatgcggcatggctttttatctattaattagccagtatttgttagtttccttttacctttaggaaagtgtgtttagtgtcccataaggactttatgttttctttttatctttaggaaagtttctttcttgtcctataagaaatagtatctacccatgggtataaatatgtacacccggngtcgttgtaatctatctccatgatcaatacatttcagtgcatcgccaccttttaccttttctactttatttcatcgtccagcgggatttggcacctgacgcggggctgcatcgctttccgatctccggcgaaggggtaagtccaatgtttcgccggctcgggcaattgtatcgtctacgtcggtgttgctcaaggctgcatcagtacatttgacctcttggattgctccagcttgattaat

SEQ ID NO: 74666 - DNA, 422 bp, Oryza sativa
  unsure (1)..(422): unsure at all n locations
agcttccgaagaacaacaatgtgcattggcgtggtaactcgtgcatgaaagacggactctcggatccggcagtcgggcgcagcctcgtcggagggtactacgacgccggcgacgccgtcaagttcaactttccagctgccttctccatgaccctcctcagctggagcgtcatcgagtacagtgctaaatacgaagcagttggggaacttggccatatccgtgataccatcaagtggggggccgattacttcttgaagaccttcaactcaacggcggataccattgatcgtgtcgttatgcaggtaaaacaaagatgcaaacatggatatgtgcagagggattgtagttcttgccatcagagccattgctaattcgagatttatggtgggtgaggtggngagcgggaacatacccggtcgact

SEQ ID NO: 74667 - DNA, 451 bp, Oryza sativa
tccaatacagagagtggtgaaaatgtaactacaaaaatgcttcatctactctattttgtggagtgttaacttttgaggcttgtaccatggactaacacttgctttcctgtttgtatgacatggttctctcttgtttcagtttcaagcttttgactttctgatgatgacccgaagtgagccattttcacaactcttccattgtctctatgtgtacccactgactattagcttgggccgtaaaagaaatctatttgtaagagtggaattgagaaaggatgattctgacatccgcaagcctccattagaggtttgtttacacatgcattatactctctgtgttgtgttgtctttgttggtcagaatgcttagccactagatatcgaatctcaggctgttcatccaagggatcgcgacacaacactacacaaatgggcgcatactcagattgctg

SEQ ID NO: 74668 - DNA, 414 bp, Oryza sativa
  unsure (1)..(414): unsure at all n locations
agctgttttcttacaactcagtaacaccaaccatttcattgcttaatcccgtgatcacttcctgtgacaaaagaagatacatagttagcatagttatgactttatgttaatttgcatgtctagtgcacgagaaatacagtaaatgcacaacatagaaaacaaacatacctcgctgtacccttacctctacaaaacgagatatcatactcagtaaacgttctagctgaagaactagtatgccagatatgatcagctcttcaaacgtgtcaggtaaatcaagacctttgaactcaagacccataagaaggcctggtcttgacagaaagatgtgtacaagaacatacagtgccattatcactgtagagatgactgtgagantgcaaaaatacttgtaagcaagtctgatatctgact

SEQ ID NO: 74669 - DNA, 466 bp, Oryza sativa
  unsure (1)..(466): unsure at all n locations
actcagctatatgtagctgtgttaaaaaataataaaaaaagattttctccattccagtaaaatagtaccttaanatattatttattagatcgaagcaaatctcataaaaaaaattaggaccgcttattaaacgttcagctcgaacatccctatggacggccccaattaaccatgcgcctccatctgatgtctgaaccactgaatgcacccaaattaatcaacgcgcgtgctcatcaactgctggtgctgtcttctttgctcacgttgtgacctctgtcatggtgtgttttttctggagtcttgtagacttcaaaaagcttgatgtgtgggtgttgagcttttgctttttctattctttttcgaactactctgtatgggctttcttcaaaaagccggatcattctatcgatccaatataattgtcataccataccactgagaggcggtacgtgcgtacgtacatgga

SEQ ID NO: 74670 - DNA, 410 bp, Oryza sativa
agcttatgaaattttcaactgttgtcagctacaaaataaccacaaaaaaatattaccttcagtccatctttgtttcccttcagaaccacatcaagatagcgatcaagcatttccttctctagtcttcaaaaatgttgtaatgtgttaagtcatacccaatattgaagcttataaaaacagctaaacacatacattggtaagaaatagaacaggcaaaaaatcagagtggcatagaccaccaaaaatgatgtgagcttcagtgtaaaaatagtgttgtttgaaactaatcgttaatatgtactgtagtaaacaaaagaagacagagcgggatatgtttgtcaaatcttaccgacttggcagaccatgatacatggtacttcccccactcatgacaatatgttgataaagct

SEQ ID NO: 74671 - DNA, 457 bp, Oryza sativa
taattcggatagggatccgaataggagtcctatgggccttgtaggccctagtgatggatcctatatattcgtgaggggtgtgaccggcggaggtattgcaatacgtgagaaaccctagccatcacttcccttcccgagcaaaaccctaaccacgcgcgggtgcaagcacatctgcgcgtggcgttccgaccctgtacgtgtggataccggtagagacgccgctggtttgcggtgctgatcggcgtgggaatacggcgaggagaaagcacgaggaggagaaggtcgagccggtgcgatcgactacttcctctacatcgacgcgcgctacttcgcgagagttccttcgacttctcagcgtcttcttccgctgtgcagcgcgtcgagtggtaacgatctatgatctaatacttgcatggttcctggtttacgccatagaaaaatttgatctatgctatcg

SEQ ID NO: 74672 - DNA, 388 bp, Oryza sativa
agctttgtcttatacgcctgttccacggctatcgttggtaggcagggccatgaacatgttgaagaagaagcgtatagatctctacgcattttgtaagcggacgttctcgcgttcctctaccaaacctgtgaactggctatcctggaaagagatcccgccgttgaaagaactcgtccgagttggcgtgaggctaaagcaggcggagacctaccggtttacagaagtaaagttcaaggacgggaagctagagattccggcttttacgtgccggctttacgacgcccggctgctcgccaacctcgtgttcctggagatgtgtgggtggtggccgcgcgaggagcggctcttctgcagctatgtcatgttcatggcagagctcatctccgat

SEQ ID NO: 74673 - DNA, 446 bp, Oryza sativa
  unsure (1)..(446): unsure at all n locations
ccaaatcgttgacagatattctgaccagcagattgaccacagtagccctaaagattgtcaatgtgagacaaacagccttcatttcaagcagatatatcttggatggggctgtcatcctgcatgaagtcctacatgaactaaaaagtaaaaatcagcctgggattattctcaaacttgattttgagaaagcatatgataaaattcaatggggtttcctatttgatgttctgcaaagaaacggatttggggagaaatggataggatggatgaaacaagccactatgaatggtagagtggcagtcaatatatatggagtgagtgaagagttctttaaaacacacaaaggtttgaggcaaggtgatcctttgtcaccattgctctttaatctggtggctgacgctntatccgagatgttagagttggccatagaaaagggccacctacat

SEQ ID NO: 74674 - DNA, 421 bp, Oryza sativa
atcttctttgagccataaatgcagaggctgagcgtgaatagctaaagaagaagagagatggaatccaaaagtaagtgtgcttatctcttcttgtccttaaattttgtggtaatctggacatatttctctgttattcccaagcatcggtagcatggtctcatcatacaatgcaggctacaccatgctgtgacacacatgatggatgcttctggttatcgcgagaaggcacctcaaagtgtccaggaaggggatatgagaaagcacactgctttgttgcgggaactggagggcataagtgaagctgagaagaaactatatgccacaaccgataatatttgactctctgatgatcattgtagtaaatagcggtgttaatgataattttggagtaaattaagcactactttataatttataactt

SEQ ID NO: 74675 - DNA, 454 bp, Oryza sativa
  unsure (1)..(454): unsure at all n locations
ntcattcatcccagatcaaccattcatctcagattgtcgcttaatccgacgggatttcgtcggaatcataaaccctgtgctcaactagaaatgtcacatgctaattcatgtttccgcttattcttcttccctcattcatgaattcagttaatatagaagtgattatatatgacgatgtggtcttgctgtccccacatgagacaaatgcaagaagaaactcgaacatagcagtgtctagctagccctctggaaagactgtacatatattggcagttggcaacttggcatgattcagaagcaccaaactgcatgaatactgttgtctgaatcagtatctgctgcttcaccggtgctgcgttttctgcataatcgatagaatactggtcttgctcctcctcctnctcctcctctctttttctttcattntatttttaggctaagttcttgctcttgg

SEQ ID NO: 74676 - DNA, 423 bp, Oryza sativa
agcttatattataactcttgatttatgacatagataatttttttcatccaacaaactgatcacatgtgttttgataaaacatgcagtcagctttcatcgttgaagtggctttgtgtgagatatcacgaagtgactttgtgttgcatttatagattgataaaattattggttacaataactaggttttactacctccgccctaaattagtggttgctttaactttttcttgtaacatttgaccattcatcttatttgaaaaattagtgcacttataaaaaaagataagtcatatttgaaatacttttgataataaagtaaatcacaaacaaaataaataataatacgataatttttttaaataagataaataaccaaacgttaaaagaataactgaaagcgacaagtatttataagtgatcgat

SEQ ID NO: 74677 - DNA, 452 bp, Oryza sativa
  unsure (1)..(452): unsure at all n locations
tggggctgttgggcaaaattngaagaagcacatgcagtacatagccccgccttcagcttggagctccccgtgctcctagggcggcgccctcctctcgtcctggagctagctcaagctcagcacctcctcctcctcctcttgggtatgatccaaatgctttcttccatccacagtatgcttattttggaatgcaacccaacgaatacttcaacccggtacttggggctattaataccctaagtgaaagcattcaacgcttgtctaccgggcatgaagctttacatgaggatgttcgtggcttgcgcacggacgttggagacttgaatgcttccgtggggagattgcacactagagtgggtacattggattctcgagtccaactgttggagagctcccaagcatttgtgtataaatcgtgtcgtgatgctcctcatccttccacttcggcgtgt

SEQ ID NO: 74678 - DNA, 417 bp, Oryza sativa
  unsure (1)..(417): unsure at all n locations
agcttatttttagtagatattctgctgtttccaatagcatggagaaagcatttcttaatatctgaaacaatgaacaatgcagtcagctgaaccaagtagccagtatatgtggatcaacatccacttttttcaaactgaaaaaaaagagtttgtgctcaagaacatggaagtggaaaaagaaaagtactactgcactactctgtaaactagcactcgataaccatctcataaaaatttaagaaagtacaacctttcaaacatactatgttacttttgtacacctgtcaacaaaatntcaataaaaaaatgaagtttcgtagtgtccagtccataaagtgcggttcatgagtgaacttttntagataaactcgcataagacaattaccatcatgtgcagcgcaaccaaatatcattcat

SEQ ID NO: 74679 - DNA, 449 bp, Oryza sativa
  unsure (1)..(449): unsure at all n locations
ntntgngacaaattttgaatccaacagcggcatctattttgtgacggagggagtaatcaacaatatgttaaaagaattaacacaatggttaacatgagcatgaacatcggaaaaaatctgatatctaaggtttaagcctaaggtcaatgccccagcttcctatatgaggctgcatctagaaacagaagactaagatgaacgggctatctactatctacaaatggtaactgttgggatggattggtgggattaccaaaaggaaaattttaatatggaaacaggaaataaaccttattgcaaagacaacaataaattattattagcacctagcatatagtgatgacataatcagtgaccaggaaatccctgtcttatcaacagaaaaaccatgtttcatcattgatacaatgtctgagttcacaataataatctgtttcagatcgttactc

SEQ ID NO: 74680 - DNA, 129 bp, Oryza sativa
agctcaaagcctcatcttctcattcgttaatgtcccacacatattctctgacaaaagaccgaatcctattcaggtcgaagatacctcagcactgcaagtgtatgagaagctcctagaagctgtccaacc

SEQ ID NO: 74681 - DNA, 450 bp, Oryza sativa
  unsure (1)..(450): unsure at all n locations
ngatggagcacagaccgattgatacttcatcggtcacttgtgaaactatttcggttacatctatgcctaagaccggaattgttagtgatcctctccctgttagatttattgatgttggctaaaagaaagggaaaagtgttattattggggatgctcggcccaaaaataggatcaaaaatgcgaacaccgaagatcatatagttgcaaaggatgagtcatctagatcccacaagaccaaaaagccgaagctcacttttgagatgcttatggctaagtacaataaaggattagccggtcaacgacttgataatcaaactagtaattcaaagagaccaagatcatcttgtatgaagggatttggtcaaacaccacagcaatcggagccatcaactatgccaactccatacaaacctccggttgtgatgccatgatatccatatccaatgtcat

SEQ ID NO: 74682 - DNA, 426 bp, Oryza sativa
  unsure (1)..(426): unsure at all n locations
atcttatctctttctttgaacatgttctcataagcacgggacaagtacaatgatagcacataatgtgctcaacttttttctgtggggagaaagcctgtatggatcaatgcatgcgactgctataattttcttaaaaaaagcacaagtgaatagtgataaagaaagaaaaagggacaacacaactcagctcattttagtgatcagctgtacaataaagaaagcacgtttatggaccacanaagttgtaagtaaacaatttgtcgtacatctgtactatgtgggttcactttgtggactccaaacattgacacaccttatgcaggtcaaagaaacagatttacctccatatgtaacagtctcatttgcgcattttgccagtgttactgaacccaatcttgctgtcatggaaacacctgcgaaattgtg

SEQ ID NO: 74683 - DNA, 435 bp, Oryza sativa
  unsure (1)..(435): unsure at all n locations
ntatgttattgctccctccgtctcatagaaaaccaatctagtactagatgtgacacatcgtaatactacgaatcttgacatacctctgtccagattcattgtactataatatgtcatattcaggcctagatttgtttttttcgggacgaagggagtacgtgggaagcgggttttcatcctttagactttgttcggttaatctcaagagagagggattacagaggattaatcccatacctcaataggcgtggaattattctccaaattctccttaatccttttgcgggaggaattaatcgaactagaacttaagggatatcctcttttgtgcatatcaccataaaagttataaaaaaaacatgcaattcanatttaacatttatagatagaaagggaaataataaattccactaccaataatacacattattcaca

SEQ ID NO: 74684 - DNA, 432 bp, Oryza sativa
  unsure (1)..(432): unsure at all n locations
ntcaccaatgtgggagggtccgtatcgagtggtctgcgtctctcggccgggctccatacggctggccacgggcgacggcactgagctgcctaacccgtggaacatcgaacaccttcgtcgcttctacccctgaggggggggtcgggtgtcaagtatcgggctcgggccaaccccgcacccccctcgggcgtgcagggttggccgggggctacaacatatgcatattcttatttctcttatatctgaatttctataaaagcagcttcaatttcctaaaggctgtatctgtgctgttttttccttttgaagaatcttgacttgaaataggtcactcgtgctcaatcctgccctcgggggctcgggtcggctaaaatcttcatacggggcccataaccgatccgtgcctcgaggcgtggtgaactccggggggga

SEQ ID NO: 74685 - DNA, 400 bp, Oryza sativa
agcttttcatgaacttctcttattctgctgctccatttcttcttccttttgagcaattttcttctcaatttcaatcgagaaatatgtacacaattggtttgagtaaccacatctttgctaactctgcgcttcaaagtttcagttgacgcatcgtccaaaatgtcatctatgtcatacatgacatctttcagttttcgcagccattccttgagtgcactagaagtactctgcttcctctctgcgtctagaagaactccactaatagcttgcaacgaattctgtagcttccccagttcttgatgcacactcctgtctgatttaatccccatcaaaccgtgttcactaacaaacaaaattatttttccaataattgacacggcaaaacttgacagaagtactt

SEQ ID NO: 74686 - DNA, 442 bp, Oryza sativa
  unsure (1)..(442): unsure at all n locations
agaggggaggtcatgccaaaatttttattgaatntattttggcgaatacatacaaatcgaaggtgcctaaaaggtttacaacttcatcgtcctatgttttttttttgtcatactacatttgcacctatgttttgcatacttttttgtctccaaaatttagttgtaagttgatgagagagaaaatgtgtgtggggaagaaagaatatatagaaatttagttcatttgctaaacaagggtttataaaatagttgagaaggaaaactctagtgaaagttaatcttaaataatagaaaacaaactataatgaaaatttaaagaagttaaacacattaaaattagtttaaaactgtacaaatagtttttaagaattatntggcgtaatattttatgatttttgtatgaataaagatatcttataattattggatgactgtcattatt

SEQ ID NO: 74687 - DNA, 423 bp, Oryza sativa
  unsure (1)..(423): unsure at all n locations
agcttgtgttttgttcaatngaaattttgtacctcaagctgtgggtgcgcaagagtgactccgatagcactgccagttgggtgatgaggaagagaattaaactgtgcatgttcattcctcctcctcatccaccattgcggcaattggaggcgctttttgatcgattgatagcgtggtctgggctacttggtttactgaagatggtagtgtggcatttctacagacgccaaatggcgtcatcatgctccagcttgatactatggagttcaagctggtgctccctatggagaggttgcattgggtttatccccattcaagcttctatttgacaggtacatctgttcgtgaatctagcaagtaatgaactgagtagtagttaccttggttggctgttgaaaagttgaaacactaccactcgaatgc

SEQ ID NO: 74688 - DNA, 461 bp, Oryza sativa
  unsure (1)..(461): unsure at all n locations
tctaaagcacgatcacatnncttggtctaacaaatgtactttttgttatttatatggtgtgtagcgcgtgtcaagccaggaaacaaattggagctcatcacccggtcaagaacgtaatgacaactacaagaccgttggaatttctacacatggacctcttcgggccaattgcttatctaagcattggaggtaacaaatatggtctccgtattgttgatgatatttcacgcttcacgtgggtgttctttttgcatgacaagagtgagacacaagcaatcttcaagaagtttgcaagaagagcccaaaacgagttcgacctcaagatcaagaacattcgaagcgacaacggcaaggagttcaagaacatgtgcatcgagagtttccttgatgaagaaggcatcaagcacgagttctcggctgcatattcaccttaacacaatggagtagccgagaggaagaat

SEQ ID NO: 74689 - DNA, 395 bp, Oryza sativa
gttgctgaacgcgccgacattttctgaaatcgacatttcattggcgttgagaatcaccagcatatcatgacggatatctgccgcgtgaattcatcgcttcaaacgccatgcctgcggtaatcgggccatctgcaatgacacagacggtgcggcgatttgtgccttctttgtcagcagcaaccgcaataccaattccggcactgatggaggttgatgaatgcccgacgcttaatacgtcatattctctttcgtcgcgccacgggaacgggtgcagaccagctttctgacagatggtgccgattctgtcgcggcgttcggtcaatattttatgcggataagcctgatgcccacatgcaaatcaattggcaaacggcgtgtggagacatagtgcaccg

SEQ ID NO: 74690 - DNA, 402 bp, Oryza sativa
  unsure (1)..(402): unsure at all n locations
agcttctgttcaatatgtcgaccaaagacaacgtctcagttccctgcgcttgaaccaaccatggcttcttgccaaagcccgacggcagcgatcctactgcgccgccgaaattgttattgatctccatcgagtggtatggcctacttggtttgttccgcactgtcgaattgatttgcctcctctcttatacaggagtaacgcgccggagccgagtcggagtaataagcgaggatgagtctgattgagtcaaaataaacaaaatntcgttttttggctcgtccgagtggctccccctatccgtgtccgtctcagttccgatcgctttcaaagaaatgaacaagatcgccgganatccaaatcggtgatcgatcgcctggggacaggggtagcgaatcaatcccc

SEQ ID NO: 74691 - DNA, 428 bp, Oryza sativa
  unsure (1)..(428): unsure at all n locations
tgctcaactaaaaggacttgagaggggaaaaagttgtggtatttaaatgatgataatgcccncagtgatatttaagtccatccttcaagaagtcaactagagaaatcagacatgctatgtatacacattcatcataatgcactctatgttaaaaaattattagtgaccaactggtgatagcttgcccatgatagctntctctttcacctcgtatggtttaaaggatagggttacatgaattatntatgtataagatttcttataggcaacaaattgtactgattgatcactctggcaaaatgaacttaatttgagaatattgttttgaaataacattatttattaagccatcacaccaggatattatgtanaaagcagacgtgaacaaaagataggtttgtagatgctgtggagatgtanatacttac

SEQ ID NO: 74692 - DNA, 357 bp, Oryza sativa
ttcttatttttacttttatttttgtcaagtctttgtataaattgcctatattggactgtttttacaagccgatggtggagatgatgatattgaaatagtggagttccctaattgtgtggtgtcaagcaactagtaagtagtaagtacaatttatatttaagttgactgagttcttttgctaattcagtgtcatattaatgattaacatatgtgtatttacttgcaggctacaactctataagagacagcctgtttggttggagggagcttttatgaaggattgtgagtttagagggatgaggctattaagtagtttgtttggttgggagacatgggaattctggtgggatgaagatg

SEQ ID NO: 74693 - DNA, 454 bp, Oryza sativa
agttattggtcaaccgcctgatatcacaaactttattctttcattggtagcatatgaaacactgtacaaatatgaataatgagttgaagcctacttccttagttcctgtttcttttgataaaagatactcctacttaaatgtgcattggtaacattatctaacaaaaaatgtgcattggtataagaaaaaactacttaaccatgcataaaaccaaatgaacagagatttgtggatttcatatcagttgaagaaattgtgatcacaagcgtcaggatatttggattcaccgatcatttatttgcactagacatgacatgacttcgtattaagcaagagctgtaatataatcaggtggcgatggtacatacatgaatctcatcgagcccagcttggaaagcgacttgcggattgtttcagtgagcttgcttgcatacaaattcaagctgatccaat

SEQ ID NO: 74694 - DNA, 392 bp, Oryza sativa
  unsure (1)..(392): unsure at all n locations
agcttggtcaaacttaaagcagattgactttgaccaaagtcaaaacgtcttataacctaaaacggagggagtatattataagaaagggtaatttccacaaaaatacggctaataaggaaatgatcggtataatagcaaaaccatttccgtttccatttctaatttcgattcgatcgattaccatttccatatggcttggctggtagaaagtcggaaacgaacatcggttggccgggaatttccattaccgttttcagccctagttaactaagatctgtttgtaagaaaaatatttacattntttaactcattcattttttttacatgtaggtccttgtattggtcttcttggcgccaaccccttcacatcaccgacttaactactggagatg

SEQ ID NO: 74695 - DNA, 446 bp, Oryza sativa
tgtcatatgatggcagcttcacacagacctcgttgtttcttttatggcgagacccccaccgccaccatatgttcccaccccaatgccattcgggaaactgaggctactccgcaatccttgcaccttgttggagaagcatcgagtttctgagagaaagaccaccacatgtacttcttgaactgcctcgagctgccctaggccctggcaattcatacgtaagagtttcattgtgcccggtggggactgcttcctgccgtcgctgccgatgatgcgattgtcagagattcagatattttctgtttctttggcgacacctccgaaatagatgcttccacctctccacctgtcttgcctagttgactcactcgctccgacaccagtccccttggaactagggctgtcatattggccacttgattgttggggtctgacaccgaggtactaca

SEQ ID NO: 74696 - DNA, 382 bp, Oryza sativa
tgcttgtttttatctcagcacgcgtttggacgcggcgtaagacgatgtcttctactcatagtgatctggctcggacgtgacgctgatggtagcgccgcaagctctgctggtagcgcgcggctcggaaggccgcgcgccgccttcgctcttccaagtagtcgaggtcatctctgcgaagctgatcttgatcagcctcgcagtacatggtggcccgaggagacctcaaggtgagctccgatgggagaaccgctttcgcgccgtagacgaggaagaaaggcgtttccccggttgctcggcttggtgtagttcgggttgcccagagcaccgctggcaactcctcgatccatgaatcgccgtgcttcttgagtatgttgaaggtctt

SEQ ID NO: 74697 - DNA, 457 bp, Oryza sativa
  unsure (1)..(457): unsure at all n locations
tacananatagtataacacctttgtgtcgggctctctttttatttgcatcataataattccaaagaattatctaaccgcgtttaaaaggatnttagcagcatcgggtcacatcattgtgagcacaaattgccaaagcaaaaagcgcctaagtccctagggatcacaacgggccacgctggtaataatattgggctgaagtattgtacaggcccaagcccattagcactcccgataccctaacaaaacaccgaagtccaagcgacgcttcgtcttccccgccgagactctcgccatttccccattcctcgctacagtacaaaactgcgccgacgaagctagggttcatcaatccgccccaatccattctcaaaaatcccatgaaacttctccgagcgtccaccgcaccgattcctcatccccctccagctatatctccgaccagatcagaccattcac

SEQ ID NO: 74698 - DNA, 427 bp, Oryza sativa
agcttctatatttgccacatgcataagatggaactaatcattctcatacacctatgcaaactacaagcagaagttcacaacaaaataagtccaacatacttttgttggcttgactctgttctatgtggggcttagtatggttaagtgattcttaaacaaatagaaatttggcatttcaaggtattgattgtgttatactatgctgaaacttttcaaggatctgatttttagagaggcgttccctataaattctgcgggtaaataataaacacatggtatattgatgtacttcttgtgctcgatacaacatacaaggcagactaaaatgagtcatggttatcaactttataatatacaattcaccatattaataacttaatttattaacttattatggatcacgtttgtaacttattatgctacctaa

SEQ ID NO: 74699 - DNA, 454 bp, Oryza sativa
  unsure (1)..(454): unsure at all n locations
tatagtggaacttaagagattaanaaatgatatctaatggttcctatcagcatatgagtgccaatagagggtatgcttcttctttgatgggacccagtgggacccggcttgtttctcatccaaggccataaccattatagagatagatatagctaaagctatctgcacatgggcccacccctatcgctcattcagcaacccaacattgaggctgccctaagatcagccagcaggacatacgtacgtgcaccgatgcactggtgcgctcacgcactggaaaagcaggccgagtttattacgcataaatcaccacgtttcgcagcaaactgtacacgagaggcttctttcgagtgtagcatggggagaaaagctaacgttcngaaagactcggcttgcgcccacgatataacccagccaagacactgcgggtgacattgagatgttgcgcgaacaa

SEQ ID NO: 74700 - DNA, 401 bp, Oryza sativa
agcttataacatatcctttccaaaggttttggtcccacgaccaaattctttccgagtcaatggaaatcgaccgaacaaattgacaccccgaatctgtcccggtgctgcgtctaggggtgggcaaaataagaccgaaccaaaaagaccgagaccgagaccgagaaattcagttagtagtttggtctcagccattgaaagaccaaaatttattcgagtaattcggtcattaccctcggttaaccgaattaaccgagaaaaccgaattgtggcccaatagacctaggaggcccaataagaccaataaactaaaccctagaggcaacaagtaccacacaaccactccctgtcacttcctcacacggcgttgtcttccaagctcccatccacatcgtgtcgtgctc

SEQ ID NO: 74701 - DNA, 449 bp, Oryza sativa
  unsure (1)..(449): unsure at all n locations
ntnttntacagcaacagttgttttagcttgcgtaaaaactaagtcctttaaggagggctggtcgaaattaccgttattgttgctgttgttgcctccttggtagaatggccggagctggttccacccctggcctccttgttgccggtagccattgttccccatgaacatggcttcctcatgggtttcggggcaatcatttcctgagtgaccagtgtttccacagacctcgcatgtgatgtgcgagtccaatgccttgacagtgtcctgcggcttggatttctcctgatcgtcccgtctcttcattaggacatccagtttagcagcaagcatctccgtctccttgacggtgtgcatgccacgatgactggtctggagtcgttcttcactccagcccatgttggataccatcttctcaataatatcaattgccgcacggactattcttgaga

SEQ ID NO: 74702 - DNA, 409 bp, Oryza sativa
  unsure (1)..(409): unsure at all n locations
agctnttacaaaattggaatgtatcatgaatgcacaaactttacaccaattaacagatatcaataaaaattatatttgtttttacaagtaacatgcatctaagtctcatcttgaaatttatcgtaatagaaagaaaaaagataaaattatgatagatttatactcttaaaattgttaaatttaaatttgaggttttacacgcgtataatattatctccatcccaaaataattttaattctaagttgtttaatatatattaaggtttaataatatatataggtaggactgggaggatgaatgatggtaaaatagtgaaaantttgaatgagagtgattgatgggataattactactctattgaataactatttaagaataatttgaatttacagtataattatatgggac

SEQ ID NO: 74703 - DNA, 444 bp, Oryza sativa
  unsure (1)..(444): unsure at all n locations
tccattatctaaaaaaattcgagcatacgcaccatagtgctaattgtggctaaatgtgccaatatacaacatgagaaataataataattactcccatctaggccggccttgccgcctgccaaagatcaagcccaagcccaactggacccatgaaagcttccaaaaaaaaattttgggaataagttcaccatccatccctcaacttttcatcgagtttgggtgtcatccctaattcccactaccagaaatcttcacctctaaactatacaaaaccatgcaatttcggttccatggcagcatgagtctctggtttctgtgacgtggcatcctagtcagcaaaataaaaaaattatagggcccacatgtaagtgagaaaaaatatggngcccacatttctttctactctcctctcttctcttctcttctcttctcttcagtgatcct

SEQ ID NO: 74704 - DNA, 428 bp, Oryza sativa
agcttttcatatagtccaagaacgtcaaattccgagacccgagtcaagagatatcatcattttactaacagctggttgtgctgaaaagtgaactgcggtatgaccgcagcccttatggcggtctgaccaatgtgtgttgtctggtctgaccgctgatcctgattttgaaggaggtctcatcttgacgatacagagccgaagacggtctgaccggagccgatggcggtctgaccggcatgcctatggcggtcagactggctagccatcgcccgtgcattaaatgcactgtaatgactagttttctagccattacaatagagagcggcatgaccggccaccccatggcggtatgaccgcccaacacctgtgagttcgggtttcgcctccaacgactagttttggtggctggaggtgtatatacccattcc

SEQ ID NO: 74705 - DNA, 426 bp, Oryza sativa
  unsure (1)..(426): unsure at all n locations
agcttttgtttttatntcgaactcaatttattctgagatagagggagtaactctcttataatatggttgagttcctttgctgttgtttataagctgaaaacacgtgattaaagcaatgaaatataatttcatgattagtatttcggcagcaatgtcgctgtatatatatatttttggagaggaaccaagtccctgtatttaatagcttagctaatgacatctcacatatatcaatatcattccccattcccttaataaggactatattatttatgtaagcagcacgtgagactatgcgaataattaacattaagaaatgccctcaatgaagtgctaaataaataaatattaaggcgacacaacttttaagttntaacgaacatcccatcacaagttcacaaccactttcttcggcctcatgtgtct

SEQ ID NO: 74706 - DNA, 429 bp, Oryza sativa
tcactaaagataacccatgtgcaccagcacaacgctcagatatgaatgttatgagtcgcaccacaatcaaacaatattactgccggtgtctagttgactgggaatgtgcccaatataacctctggtgctgactgcgcctcctctgcagatgcatgattaacacaggcctgaacgaacttgggtccaccacgtcttggcttcaggcactttccaaccgtgtggtcgggttggttacaattgaagcagagttcgggtttttctcccaacctcttgggctgttctggcagagctggctgagctggctgatctgactgagctggaatcattaatagacttggagtcgggttgaggctgctgtgactgccactgtctgtgttcctgttgaaattaccccggtggttaggacagtgctgtcagataatcatggtg

SEQ ID NO: 74707 - DNA, 431 bp, Oryza sativa
agctaggaagtgtgtgttatattgagtgagatgatgttcttatatatgggtaggtatgatgatcgaaagggcaatgtccgaagtgccccgcaaccgccatcatggagtgatctgggacgtccatgccaaaacctgggatcaatggtgatcaccaaggttcgtccgaacctgggctgggcccccctggcctggccattggcctggctcctcctctgatcctcctttatccattcttaagtgttttgggctgattctctggtgtttctacgaagttcacaacccatccttgtatggatacatatttctcctcactttagtctagatttcctctcaacatcggagtttatcacctgcatacaaatatacaccaacactgttgaatatgtgagataaacacctatcactatgttggatattttattatccgaact

SEQ ID NO: 74708 - DNA, 456 bp, Oryza sativa
tcttctcagatatcaattgtagatgaagaggattctgaactttagtgttcagagtacaaaatcaaagagacaaacatgttcacagtagataactatcaacagctgcactgaagtttgatgatctcttggcctcttcagacatttttttaaaaaacaattgtgtatttctgagtatttttaacgagtggtgttctttagtatacagatcggattctttcatgatgagaaggcatttactgtgatgggatcgatatactgcgattagccttgtggttggtttgcaccggatccagtcagattgaactatattgagtgtttctctctccaatttcttcgaaaataataaaataagttggattgaaataagttcgatcacaggcaaacttgtctttattgagtgtttctctcttcaattccttcgaaaatataaaataagactgcgagtgtccacagcta

SEQ ID NO: 74709 - DNA, 347 bp, Oryza sativa
  unsure (1)..(347): unsure at all n locations
agctttactagttatcaaacttgtgaagacttaccacgaattatggagatgcttaaacatgggaacgtcgaaactgtctcctttaactccaatgctgctggtgggtgggtgggggtttgggggggggccntttcttctccttactctctatttcttctcttatcttctttagtcttcttcgcttttcgtacatttctctctctatatctcctctgtagtgtttattcctctctttcatccattatactatagatctttatcagtctcactcgttttgcttcttacttcgatatctctgtatacacttttctccgcctttagttgtatttctgtctgtgtaactattt

SEQ ID NO: 74710 - DNA, 375 bp, Oryza sativa
  unsure (1)..(375): unsure at all n locations
ngatcatgatccttttctggtgaatacgattaatttcaatattaagattgtgttgattcggccggagcaagccgaatctactaaaggaaaaggagtagtcattggcgaaccaagacctaagatgatagtgccaaagaagccggaggttggcgtttggaaggagaataagagtgaagcttcaacttctaaagcccctaggaagaccaaagtaacttttgatatgcttttggagaaatatgagaagcaaggtggtgagacggctcacaacaaaggaaaaagaccaagatcacctcctatggagcaatttggtcattcaccaagacggtcgcattcacctccatatcatcatccacaagacatgtcatggngttctta

SEQ ID NO: 74711 - DNA, 402 bp, Oryza sativa
  unsure (1)..(402): unsure at all n locations
ttctttgtatgaganaaaagtgtgcgttgggaacaaagttacgctaaatagcagttatggtacttcccgttcgaaaatataaggcacaactatccttaatgcaaagaccaaaaactattattattatttagtctcgtttgaatcatcctaataaatagaatgcatgcatctaataaaattagatatttaaagggtgtaggattttaaaaataataattccgacgaaaagaggtactaattaattgctttcatgcatgcatatgccctatattatgaaacatgtgaaaaacaatagctgtattttatattttagaatggaaggagtgtttgtactnttttttccagatcccaaatggccacatgagctggctagctctcctacacttcactcattcattgaat

SEQ ID NO: 74712 - DNA, 421 bp, Oryza sativa
agcttcctccagattcctcactaacatctctttcctgataaaagaaaaatataagttaacaaaactatcaagagattagatgaaaataatgcaaaatgatttgctatgaatattcaaataattcgtccagtcacacacacacacacacacacaaaagttatcattatcgggagggtactgtaaaacttgatgtttgactagtttacttttgttgaatattagattgcttgcatgaaaatgatgagtagattcactgtagaatccattatgaaattcaaaaataagattacatctcaaagaccattaaagtaaacaaaaaatgactcctgctaccagagggaatacacaagtgattgtaagcgtgaggcttcacgttcagtacttacaagcgactccagatcatcatcttcacgagcatatt

SEQ ID NO: 74713 - DNA, 428 bp, Oryza sativa
tggaggtctcccgacgtggctgatcccacgggctgggtgatccggtttagtaatgtcatgtgggtaaagtgtaccccctctgcagaggttaacaaactgttcgaacagccgtgcccacggtcatgggcggatgtgaggtgattcctaacgtagctttgtttaactactgcttgtgaaattgctgttgtggaaaggggttcgatgtttgaaaaatctgtagctgatagaatcagctaggcctgtgtggccgtttgaaagtagttggcccgggtggccgtatgaaaagctgttggccgggtgccaacctttgttcaattctaaagactgatacattacacatactctgaccggacgagacgcactgtctcatccgtgttcgttgagaagcactcacttagttgtttttagataagagttcacataaaatc

SEQ ID NO: 74714 - DNA, 380 bp, Oryza sativa
tttggttttatgaataaatggctgttttctgtttaattcgaatgcatcaagatggtcttattgatccatctaatttttctattgttcagtggaaaaacatatcaatgcactcagctatttagcttttccaaagaaaagatgcaaaactagtggaagtgactagcttataatgattttgcatggagtttttctttgcgcactaaaggctattcttactttgatatcatgttatgtcaacaagactaataatcactagctaaagaactcaagtgttcactttgttcgaacagctcatatgcatcccattgctagctgtactgtatcaactactaggttaattcaattcaagtgaatttacttaattaatgtagtcattgtat

SEQ ID NO: 74715 - DNA, 103 bp, Oryza sativa
  unsure (1)..(103): unsure at all n locations
ttccccattattcaccgagcatatcaagcaagctctatcctactactgnttattcacgcacgcacgtacgcgaatcgtgtggaggccgtcaacttattcaaca

SEQ ID NO: 74716 - DNA, 416 bp, Oryza sativa
agcttctttcttatgcatcaaatcagcacacaacaaagttatctattttcaataaagaaggagacccaactgtacaactcaattataatggatttcaaaatgaacatccaaaccaatatatacgtgtagtatgcaaatggatttcaaaatgtatcaaaacactttggtattgatatgtaatgattaataagtgttttcaaactcatattcacagaagtacatgctgtcaaaagatctcggtcatatggagcaagatatgaattttctttttctcacaaaagcaaggatgtatgctatggtatcacgatgaacgaaatgatgcgatgcatgtatgaaatgatacagtgcttatgaagatatcttgtattgcatacatgccatatacaaatcttttatgaaaattgtcttgagactat

SEQ ID NO: 74717 - DNA, 345 bp, Oryza sativa
  unsure (1)..(345): unsure at all n locations
tggnggtatctcaccttggagggagttgttccattagccgtttatctggagattgctgcatgaggaaagctcatctggaataccgccttcaagagagttgatgctcaagttcatgtagctgatttgtcccaagcgcccgagctcacttggaatttttccaaagaacgcgttgcttgataaatcgaggcttgcgatggagctcatattgccgatgcaaggtggtattgaaccaccaaggcctttggagctgacgttgagtgccatgactcggagttgggtctgtgtgtttgtgcatgaaacaccctgccaattgcagaagttctgggaagtatttggccatgagct

SEQ ID NO: 74718 - DNA, 361 bp, Oryza sativa
agcttgtataactatgtcaacctcgaccaaattacagcgctatcccataagagaagagagacttggtagtaactatacaattagtggggaataatttacaagatatttgattctcaatgccgacattttctggatctaacacaacttacatttgtaggatcgaatcataagaactaagccaaccagaggggggtgaatggttgatatatccaaaaaccaaaacttttagtggaaataaaagttaccctcaaatccgatggatcgcggtctgaccgaagtggatgcgccggtctgaccgatgtagatcgatcggtcgaaccgccgagaacgtctgccgctgcctgcttgcgccgccggtctg

SEQ ID NO: 74719 - DNA, 444 bp, Oryza sativa
  unsure (1)..(444): unsure at all n locations
ctgacgntacgaattactgagtctagtaccacggggtaccgtcccgggtggaccactcggtcgggatgatccgaacgggcgaacttgatcgttatctccgaccaccaaagatactgcggcgtatcaatctggacaacattgatcctccattcagtcaacttttgctttcttttagactcgcaagctagagggccgccaaagatgtgggtgagctccttgcggnggtcttgaaaacctgtcggggcatcatcatcatcatctatcttttttgacgtgctttgtcctccgtcagaggtcttctgtgcattcttagcatattgctctgcaaactgcttgtagacgaagcaatcctctactgcgtgttggagttgggatgatgccgacattgggagttcatgatcttgtctaatgtgttgacacgcgaacgttgtctggagaagtgtg

SEQ ID NO: 74720 - DNA, 404 bp, Oryza sativa
  unsure (1)..(404): unsure at all n locations
tagctttatcgttccatgactggcagcttgctntaccttaccgcatctaagccggatatcatgtttagtgtttgcatgtgtgcacggtttcaagccgctcctaaagagtgtcacttaatggccgtgaaaaggattctaagatatttaaagtattcctctactattggcttgtggtacctaaaaggagctaaatttaatcttgttggctattccgattcggattatgccggttgcaaagtggaaagaaagagcacatccggtagttgccaaatgcttggtagatcccttgtgtcatggtcattcaagaaacaaaactccgtagccctctctaccgccgaggcggaatatgtttcggcgggtagttctgtgcccaacttgcttggatgaaacaaaccttgttggac

SEQ ID NO: 74721 - DNA, 447 bp, Oryza sativa
  unsure (1)..(447): unsure at all n locations
ggatactatcaatgcaattntatctcatcaataacatctgtttcctcatattactctcaatcaaccttataacttcctaccatcctcatttaatatgggacacctaagctgtaactatttttctctcccactcctaaaattgcacttatattgcaattttttttactaacagttttttttaaaaagttaataagcttattactagctagcttacacagagttaagctttactatatcatgaactacatatctatataccatatatatgcccctacaaagagaccatagaaaagtaaacaaaatcgatcaaaaaccgatggccggccggcaagcacgtcatggtatattatgaccatgcatgcttcgtacgtacgtatagtacatgcctacatggtagtaatatatatgcacgatccactggtggagaaaccatatatacttccagtt

SEQ ID NO: 74722 - DNA, 394 bp, Oryza sativa
  unsure (1)..(394): unsure at all n locations
agctttattccagtgcagatgttggttggtgatgtctgtaaatggggaacatctcggtgactattttgtactcactgacagcccaatctgaaatctttaagggctcattcctttcaaaagaattccaaaggattattgtagtaattgaaacctcatggtttttttctttgtgcattaattgtttcatagtaacagatcctactgaatatgtaaggattgtatccttataatcttgttccataaaaaaaacttctaaagattagagtgcatgtgtcatcctaataatttacttcttttaatcctatgttntggaaatcctatgaaccatataagccctaagcacaaagcgagtactgctatacctacgacccagttatacaactcacatacaact

SEQ ID NO: 74723 - DNA, 452 bp, Oryza sativa
  unsure (1)..(452): unsure at all n locations
ggattttcccncatacatgtacaatgggctgacattacggagccgcatcaacttacagccggaggagctcganaagcttggacgtcacaagagcagtttgctcatagaccgatattcgttagcgagattgcagttcttgaagcagaaggccaatcctttgagcgccaagaaataatgcgtcgacaagcacgagtgctccaacctgttgtttcacgaaggaacatataaaagcattttcattggagaaaagaattgatgtgtgcctctcttgaattcagagaattaccaaacggcctgtgaagatcagacagtagcccagcccttctttcacagactgcgctcgtcgctgatccgtccagctgaaatgaagtcgttgcagtacacaaagccttaagatttgtaatctgatggagtgctctggagtatggaggagcgatagtgcatgcttctgt

SEQ ID NO: 74724 - DNA, 409 bp, Oryza sativa
  unsure (1)..(409): unsure at all n locations
gtccatccatttgtgcatcttctctctgttcagcatgatgatccatttatcctaccttaggaatccaaaacattgattatttgggcgcaagcattttaagtagtactgcatatggcactgccattgcaagctcacaatttggctctacgatatgcgaaaaaagattctaaaccatataatatgcctgtaattgaagctgcaaaacgggagctaggcagctacagctagctgaagtgaaaatctactggacctcctgatatgcaacagntgatgcctgaggacatcatgtgatgcttctatttgagcacattttgtcatcttacaaacagagtcactattatttcaatatctattatcacttaaaattactgagcctatagaattattcacaccaagcttcactactaaa

SEQ ID NO: 74725 - DNA, 436 bp, Oryza sativa
  unsure (1)..(436): unsure at all n locations
cacctaaaccccgngatatgctgagtacgaaatgtctttcccttgctctatataaacatatatagttccttcgtcgcgaaggtgaagatgaagtgaaatgaacaatatggtttcgacctggtttccagccgtcacctgtggtggtgggtgtttgaccgtaggttccgctgctgctgttgttggtggagatttctcgagcgcgtcgacgggtgtattcttatgctattctgagctacaacctaagataaggtaaataagtcttctttttattttttttgattgcgatgattcatttttgtcaccgtgggtaccaacgctggactggtactgtgatcgctgtttcgtaagaagcggatcgcgccgtttttctacgacatgctctatcatgtgccgtgtacagcgggcccatttggtgtgaatgattgatcgccccccc

SEQ ID NO: 74726 - DNA, 409 bp, Oryza sativa
  unsure (1)..(409): unsure at all n locations
gagcttgatgatgaacatatgtctatgaactgggaccttntttctttcttggtaattaaatatgcgttctaaagttaatcattttgtttggactcccttgacacatgatcttaaaaccggtgaaacttgtttaagttttatggacggaggacctttaaagcttcaatatacattttttattcttctcatgaaaataattttgtgatgtgtaacataccacagaaattggtgataaaactgtacctcccaagattgtgtcaatatttaaacgatcaatttctgaagccaaagacttatatgtctatatggctatgtcgatatctgatatctattggtcatcattcttatgactaactttcgtgtccattttcatcagtacccttggtcaaaggcttgaaacaagcatata

SEQ ID NO: 74727 - DNA, 461 bp, Oryza sativa
  unsure (1)..(461): unsure at all n locations
taaaactcagcttgcgcataatagcctcgagataattccattcaacccgattgtttcaattattcatctagnttccgatgttgttgttgatgatggtttagtagcttcnggtaggtagatgtagacaggtacctttgatgtttgaacttattagcgatttagcttttagcagagcttccttttctaagtctggtctctatggaacgaaccagctttttagttaactcaataaatcgtataaaaataaagcaatctttaagttcttggcgggcggggacttgaaatcctctttagctttgcgcgttggactctaaatcctaacatagtggttcgattccacctcagaatgaccttcacgatagtgaaaaatcttcgtcctaccaaaaccggatcttgaaaagttgtcagtgcccaacaagcaacggtgtgagtgcactagcgcgatagcgttatcgcgcgca

SEQ ID NO: 74728 - DNA, 428 bp, Oryza sativa
  unsure (1)..(428): unsure at all n locations
agcacggtctcgttaactcngctcacgctaggctcggactcgcatacctcagctcggctacaaagccaaacgagccaccccaagcctccaaacgagccagcccaagcctacttcctagctacgtgtcgaaacgagcgagcccgagctggctcatgagccactcgagagctcgcttgtctaagtaacaatagggccatatgtaaaaattatacaccttctctaactatttatttgttgaagacgataactctgaatgaatactatctatctatgcggtgagacgacgtattaaagaacaacatcactctgctacacattctatgtgagtaaaaggtgcgcgactactcttatacatgcttgagattaatagatgccacgctcgacgctcgagcccataaacgagcctagccgagctgtagtttagctcg

SEQ ID NO: 74729 - DNA, 463 bp, Oryza sativa
  unsure (1)..(463): unsure at all n locations
gacactctnagaaactcaagcttatttatgtgctgatttggtgattctgcttcatgatgtatacattcttgtcgctcacggagagtctcgttttcccggtagaagagttttgatgagctccctcacgccaatctatgcaatgtcacactagattcctaaacatctccttttgagcactgatgatctctattaaacatctattgttctctatctccaatattgccatttattttcgaatggtcattgggtggaatcaacctatcggtttgttataacccttatattcttgattaccttattccttgataccttgggttattataacttgactagttgagctctacatgttggttcaactagatgtattaaatataaatgcttagccctgcttagaaacattagtacactattgggataacttatgaatcactataatttaatgatggcttaatgatagttcact

SEQ ID NO: 74730 - DNA, 409 bp, Oryza sativa
agcttgtttattgtcatgaagtagtttcaccaaaggaaattagaatcttcttgagaagggcagacttacatgataaattgacagccgatgaatattacaatctcatggctgatgagagggaggacttggttcaatcaaagttgagagcgcttgctaaggttaccaatgacaaagaaagagttgctcggcattataacaagaaagttgtgcctaagtctttttctgaaggcgagcttgctaagaaattatatttgctgatcggaactcgtgataacaacatttgcaagtggtcaccaaattgggaaagaccgtttcaaatcctttaagttgtttcaaacgagctatatgtacaaagctcgatggtaagcttatggcaagcacttaatgggaaaacttgaagaaaattatc

SEQ ID NO: 74731 - DNA, 467 bp, Oryza sativa
  unsure (1)..(467): unsure at all n locations
actcaagcttctcttactgaagggggngaaagatagagcaacaatgagttcaacctcttttctcagcangtcacaccggagatgcataattaatgcaaggaggtacacggggataataatatcagcgttaagttttgcagtaaacagcatttaaaagtcacttaattgcccatagccattctaaatagacgatcctaaagctacacagtattgttaatcaaggtcgtgaacccgcacgaacctgccttaacccaaagcctacgatgattcataccgaactggcaacccgaccctgtgtgccagctcgtcccaagccaacccaggccaaccattccacattttagttgttaagcaggttctaagaattaaaacactaacttgagtacattgcttggtttgcccataaccgacggcgcggctattctaatatgttatactctgatcagaagagtacatctttacccaca

SEQ ID NO: 74732 - DNA, 419 bp, Oryza sativa
  unsure (1)..(419): unsure at all n locations
atcttgttgtggtangacaacttgaggtgctgcaagaactccaaagtttataataagatctccgcctctgacccataaataagaggtaaagaagaaaatgctagtcaagtgaggatgaaaaacttgcctctttttgaggctctatgtgggtatggatgtgctgcctttcgtcttggcctacgagggggcaaatgctcgcctgttccattcttttgaaccttcaaaaagtacttctgtgcatggcttctgatctgttaagataactgtattttagatcatgcacggtatgtcagatgcattaccgatttactattaagcaaaaacaaacatgttcatttacttattggagtaataagttgacagtgagtgagttatatcttgttaaacggacaatcgaatgcagatcctacaccacaaca

SEQ ID NO: 74733 - DNA, 445 bp, Oryza sativa
  unsure (1)..(445): unsure at all n locations
nttgccgccgccccgactggctgaccatcccaatatagattgtacctcctcgtcgcctctgctgccttcacactgaccgcggcgtgagggccctaaacctccgggagggctccggcgaggtcccggcggaccgctagttggaaatgcatttaacagaatcaaatattcaattcgcttcttgattgagcaaagtataggtgcaacgatgttacttatatgtataatgaaactattaatattccctcttgtgatgctatatctgcgatatgcttggctctgtctggatattggttgccgcgagctttacttatatgtctgctgctgctagccgtacttgacgaagagacgcatatcggctagatgtccttcatggcatcacgctaagcaacgccctggagaaggagaagagcaagctacgtggcggcgatgacccgtcgtgctggtc

SEQ ID NO: 74734 - DNA, 410 bp, Oryza sativa
agcttattatattgtcttctgggacattacaaattattttcttcaagtttttttaagttttttttatttttttttctccgctgcaacgcgtgggtaaccactagtttcctaatgaattcgttcctacgtgcgaattcaaagccaggccccaggcaagcatctctacctttgaaaatagttatgacctggtggaaatagtatatgagcctccctaatgtacaaaaaaagaatactggacatttgttatattgcaaaacacggcgatggcgattatgcacaaaattatttgatctgctcttccagacctcagttgctaacttcttctagagcacagctgctatatcgtgtatgtgcacaagatctaatactctacaatatcaactgctctctagcatatttaaatgttcata

SEQ ID NO: 74735 - DNA, 397 bp, Oryza sativa
tgccacagttgcggcaggcgtcgtctcgtgccatcttgtggttgccatcggcgccgccctgggcgcctctgcaagcgccaccctcgacgcgtcttcgcgcccactgcagctggacacctccgtgcgccttgcgctgcttacaggcgcctgtcgaggaagaggactcccccttcctctcgtcatcctgacaggcctcccactgctcctgagtgagatggagctttccgcctatggtggtatgccccgagaaaggttgtggctcatcgctgtcgacgaacttgaggcgacctatcgccttctcgatcgacatcgtggagaggtccagcaaagactcgatcgagcgagcgatctacttgtacttctctaggacgcaacggaaaatattctcgactactct

SEQ ID NO: 74736 - DNA, 419 bp, Oryza sativa
agcttattaagtgctgttgatagaggcaaatctaaaagtcttccatcttgcaaaacttatgccatcactcgcccaaccaagcggaaatgttcgatgaccttagaaaatctactgccttctgaagcatcaacggtaagtggccaaggccgaggaaacaatccaaagggagcttgtatcaagtggctgccattgtcaggtaaatctgagctgagttctttggctgccaagtcatcgtcgggacttgcgctcctatcaatttgcattcccgtatcagatggagaactagatctccataatccaaggcgaacactctggagttcatggcttaagagagtatagaactccaaagtgggcccaagccctgttccaacttcaccacagtattctacctcaagaacagctctctgactggagaacat

SEQ ID NO: 74737 - DNA, 452 bp, Oryza sativa
  unsure (1)..(452): unsure at all n locations
taaccttgcggaagaaattcttagagatattgtgtagtgttgacctagcacattctgacgaactgaaggtagaggtcatggatgacctgaagaaagagttctctgacagtgaggactactgggattggcttgctaggcttcagcttagtgactcaactagttccagtaatttgaatagaatggaagctttatcaaataaactgaataaatcaatacaggtaaaaactcattatttnggttattttatctgtcactcaatcttgcctgctttctttgggagaaaaaaaaggttgttgattaatgcaacctgccctagacttacgaataatcaaactcaatatttaaacatttcaaactacgttttttgtattgtaggtgtatgatgaagctgtcaggagggtgccaacttccagaatgtattccctgtatgcaaacatttggatgggtggtct

SEQ ID NO: 74738 - DNA, 415 bp, Oryza sativa
  unsure (1)..(415): unsure at all n locations
agcttgttgtttatggatcgnccgcttgggctgatgaacgtggctccacttgtgttgaggaagaagtcccttgttgtggctccctaagacgtacgtctccaagaaccaaccttttgattgcttcgctaaggtcctcctcttcacctaacacatgtgagtcaactcgctctacttgagagccgttagtctcgtcaaatatcacatcacgcgcgatctcaacaataccggaggttttgttgaaaacgcggtatgcgcactcatttgacccatacccaagcaagaacccctcattcactttatgagcaaactttgatgatctagccctcctattaagaatgcagcacttactacccaaaacaggaaagttacacacatttgtattgttactcggcagaagctcataaggagtcttctt

SEQ ID NO: 74739 - DNA, 450 bp, Oryza sativa
ttccgtgcacaccaactatcagatgtcacaaaatatttctatatatatttgaacacatactctatatagtattacacctatctgtgacacttcatgttcaaatcattatattttaatcgtaacgaaaagacgatattatgaccgatttttaatcttacaactgtcaaaattctcacttttttttgttacagctcaaatatatgcgaattgactataagactttgtagatatgtgtcatactattaagagtacatgtcatattttttctagaatatcccgcgatatttggctgttaatgtgcacgggaagctcgtgcggattggatatgatctccattaacatacagttaacagtgtataatattaccacgttttcagaacacgctaccattattattgttgcctattggcagcttcatatttagcttcaaataataatattatcgatcat

SEQ ID NO: 74740 - DNA, 400 bp, Oryza sativa
atcttgtttatggacatgaagctgttttgccgtgggaggttagaatcggctctagaagaacggaattacaaaatgatttaacagccgatgagtattacaaccttatggccgatgagagggaggatctggttcagtcacgattgcgagcccttgcaaaatttatcaaagataaagagcgtgttgctcggcattacaataagaaagtggtacccaaagatttttcggagggggaacttgtttggaagttgattctgccgattggaactcgggatagcaaattcggcaaatggtcgccgaattgtgaagaaccgtttcaaatttataaagttgtgtctaaaggagcttacatgttgcaaggactcgatggagaagtttctggcagagcattaaatggcaaata

SEQ ID NO: 74741 - DNA, 434 bp, Oryza sativa
  unsure (1)..(434): unsure at all n locations
cgcttgaggtgtgtgagtgaagtgaggagaggaactccttatatatgctgccaatgacagctgtggcagttggaatggtcaaaattgccctccaaccgtcatcggggagtgatccacgccgtccagccgaaacctggatccaactgtgctaaggagggttcggctggcggccttctctgttgcttctcttcgcagacttgtgaattttggcccaattcatcgtgtcaattctgagttcttggcccattcatacataagtctaattctcgacattgtccgattaatttatcgtctatgttgatgtcgattctcctccactttattgtcattctctgcaaaaaaggttagtaaacctaatactagtggaatattattattctaatatatatatatgcattgcaagcatcactaattctctattntggtaatattga

SEQ ID NO: 74742 - DNA, 442 bp, Oryza sativa
  unsure (1)..(442): unsure at all n locations
ttcaggctgaccaacctttctgaacatttcagctgtcattgtacctgcactgaaagcctgaaggtaatgatatgaccccccgcatgcacttcactaagaaattaataaataggtaaaggaaccatagtaacattngaagcaaattgccgttaaaaagaaaaacaaaagagtaaagtacatggcccgtttggacttatatgatacccaagaacaaattgaagatctataaatatattttgagagtctagggatctagatgatacacccacacaagtttagatactgctcgtgcacttcacaaaaaaaaaagaggaaacatttgaagcaaatcattgagtcagtgttagactttgaatttgtaatcggggaaaaagcggtcagtatgacttgtcaattgtctctcacataattgccaagcagcttgtgccggataaaatcacag

SEQ ID NO: 74743 - DNA, 311 bp, Oryza sativa
ttatattgtcacagtgctgttggcgtcttaagcaagtgattggatgcaatatcattgctctttgccaagtaagtgcgcatttttattgaccaatattatggcttatgctgattatatattggggtcatgtttcaagcgggtggtaaattctttatgagtatatctactcggattttataccacatatgccatatattgccgggagtggggagactatgtgttttttaggacttaatcacattggtaatgctatgtgcgctggtgtatgccaaacgttggaaattttttatttcaactgtaagctgcttata

SEQ ID NO: 74744 - DNA, 441 bp, Oryza sativa
tgtcgcatgcatgtgatcatctggtgaataaaaagatggtttataccagcttcgatcaatatttctccgtccgtccatgtacgcaagtgttggggatggtgctcgccggtgccgtggcctccgccggcgccatatcggacatcgcgaagaacggcaactcgcacgccgggtggctgccggtgtgcgggcagatacacgcctactgcaaccacgtcatggcggcgctcatcgccggcttcgtcgcgctggccgtccacttcgtcgtcgtcatgtactccctccacattgtcaccgatgtcatttgcccctgccattagcagagtctatctatatatatagtccatagtagcagtatatatataggtcgtgatatatacttccatcaccaataatttccggtacgtatataccattttatattctctatatctatgtctcaat

SEQ ID NO: 74745 - DNA, 396 bp, Oryza sativa
agcttattattataactacatttcttttaacggctacaagtacatttttgtgatattatagaattgtgaaacttacttccatctttgagagagagagagagagagtcccattggttattctaataagccaaaaccaaatccaaaatttgaattctcaaacttaattttgattttaattttaagatattttcaatgtagttttttttaagtattgccttttaagtcacgaagaacatatatatatatatataaagttttacctataaattaatttttattttctaataaactgttttagcttattaggaaatatgagcaaccgataagaactgtaatgatccatcttagcttattagtgaatatggcaactcgaagagaaccacatagagacaaaca

SEQ ID NO: 74746 - DNA, 457 bp, Oryza sativa
  unsure (1)..(457): unsure at all n locations
tatacctcatncgccgcttgcttgcatcttcgactcgtcccttgagctcttggatntggctggcgatttgacggcgcaccttgagcaccttgagttgttgggccaccctttggacaggccctgcagcctcagctatgccaatgtggccaacgcgatgtgtgaaaccgtcgatacaatcctcgatgtcataagacaattctccgtacttggtttctccactcctccgtttgcacatcgaggtcagagtctacctctgccagcctatgaaggagagcattcatgctgctcagctcatctttcataaactccacctccctctgtaatcctttcagctttgcgtactcctccccaagaagtgcactgagcttgatgatgactgaggtcatctgccctgtcaaggcacttgccatctgttggaatttacatcagtttagtataactcacatcagaatgattg

SEQ ID NO: 74747 - DNA, 313 bp, Oryza sativa
cacaatcctgaaagctgaatgtggagggtgtaatctcgctgaactcagccaagccagggagaattggatgtaactttttctgtagatgtccgtggatatattatttgcctgaatctaaatccgtatgagaaagatacgcctgttgtaagaaatgacactcgaatatatcagataaaaccctaacttattttttttatatgatgtaaaagaagttaaaaaaggctaagagtattcaaaatctaatctactcttgttggtggggggagaggtggggggctatatgacaaccaaaacaacgaagagcatggatagc

SEQ ID NO: 74748 - DNA, 463 bp, Oryza sativa
  unsure (1)..(463): unsure at all n locations
aactcaacttcttaagtattaaaatccagcacccgctatatacctattggagcttagaagatnggcaagaatccatattcttttagtggtagcgttaatcttaggtataagtaaatccagagttccttaaactagctagagtaacattctacaatcatctttggttagactaagattaaatttggatgacagatactcaaattttgagaactgaatgtcatgacataacaatttccagaacctcagttactagttttgtgtagagaatatctactcatttttatcctatgagaatcacaacataaagtagtatttgttaaatatacctgcaaagatgcacttttagctaggtcatatagtataattcgtgacccaaagaacatttagtagcacatttttcttgatcagggcatcaagttatggcccactgatggttggtgctaattcatgaaattttttatac

SEQ ID NO: 74749 - DNA, 443 bp, Oryza sativa
aaaactcagcttataaacgtctcacatgtgcggaataacaaacgaacatatatgtgttcatgcttgcaaagcacgcaatatttatcatcctatcacattgctctcatgcacctaagacttttacgcatgttggtgagggcatcaaccaaataagccctgaattccctaccatctctgcctgacatatagggattaacttaacaagacctatagcgggagagatctcctgcttttgtaagcaatcttcgtgcgtgaagtctactcgaactctccaagtcgagcacttggaccatcgcatgagcccatcaggattatcggagtaggcctactgtgccaattgggtgggctttttgcacggaccgacctgcgccttgtgggcttcgtatgtccaagaacgtatactcaccgaacgctgagacactgacagatggcccaaggctgct

SEQ ID NO: 74750 - DNA, 410 bp, Oryza sativa
  unsure (1)..(410): unsure at all n locations
agcttttttatgtgattnnttttttgcaagttcacatagaggtgttgagtaataagatgaatgattgaacgcatgtttaaaagtaaataacgtcaaacattataactggagggaatatccctttagaatcagccttttcaccatgcatcctagagcttctatccaaatatttaggcatttatgcatgaataatattagtgttacttgtaaaaatttagcaagctatatggtaatgaattaaataatgaatccacaccgttataatctggctaactaaatattaattgctccattccgatagaaatagatgatgtntcaagcggtgaaattgacttgcacttagtagtatttgtctatcggacacgacaagtaatactggcctgagtgagtgcatatataattaaataaat

SEQ ID NO: 74751 - DNA, 471 bp, Oryza sativa
  unsure (1)..(471): unsure at all n locations
ggaccttgaaactcagctttgaataggctccaagtacaattcaactaatcattttcaatgatcttcatatgctccaacaaatggaactgcttttaagatgaatgaaggttctgctagcgggacaactgaatctagtaagtactattatcattagcacatttttattattcacatttagtttttttatttgtgtttctgtttaaggatttttagttatctgctgttgataaatgtcctaaactgattatgtatgtaggcaattcagggcctatgttgtccgttgatacaattgagaaaatgatggaagatccagccgtgcagaagatggtttacccgtaagtttgggaccaatataagtcaaaattttgtctacatgaatacagggttatacacctcttactgatgttagatatctntgacatctttgaggacagtgccacaacagtataacatgaagttaattctgcatgg

SEQ ID NO: 74752 - DNA, 434 bp, Oryza sativa
  unsure (1)..(434): unsure at all n locations
agcttcttataattacgttttggatttcaaagaatttcacatgtacatttcgttcgcgcggtttgcatacttcttaccatttggaattgttcgtggagcccaagcaatgccagttatatcacctgattacataaagaaacatatcactgttagattgcagcatatatctagcaaagatcataacaggaaaaggtggtaattatagcctaatgtatcagcactgcataactttatcgagtggaaaagtagtgaattctaaatactaaattacgatcaaatttctgaagacagcacacagttgagaccatctgttatgcaagtaagtattggtataatccatggacttcatggccatgatctacaagtagtctgcaggatcattgtaaagganaataacacatgaacattgaccacagagtacagagtatgatgta

SEQ ID NO: 74753 - DNA, 468 bp, Oryza sativa
gaaactcaagcttctctcttctctggtattaagagcaagcaaacagtagtctatcgaatcgagactgcgagagcagagcattgttcttcttctctagctattagtggtggggaataatggcttccgccaccaccgcagcaatggccctcgcgccgtctccttcccatcaccatcaccatcaccatgtcaagcagctgcagctccctccgtctgtctccgtctccgtgcccctccgctccggtttacttggccgcgcactgcctgctgctgcccacccacagccgctgctcgccgccgagagccgccgcagcagcgccgtgtccgtgcggatgtcgtgggacgggcccctctcctcggtccgcctcattatgcaaggccgcaacgtcaaggatctcctctcctactgctaccactagtttgcttccctggaattccttcgcttcatattataaaggttttagcattact

SEQ ID NO: 74754 - DNA, 427 bp, Oryza sativa
ttcttctttaagagccattcctccaagtgcaattagtgctaacgatgacaccttatcaaatgttaacaatctgtctctgtccatccctatagcagattgattggtcataatattagcaatgaagttagttttccacttctgaagaaaccacagaagagatacaacaaatgttcctctccatgcctgtggaagataaactgaaatacttggcacaacaattgcagccctgaagaaggagaaagaattagatgcattccatacatacagaacgaattacagcactaaaaatcatttcacttacatatttatatctaactaagagagtatctataatttgtatcatattgtacaaaagaagaaaataacatcatgctaccaatctgtaaggaaaagtgaagaacatatatttgccaacaaatttcttgct

SEQ ID NO: 74755 - DNA, 442 bp, Oryza sativa
  unsure (1)..(442): unsure at all n locations
tctanggtcattgctgaaagatgtagatcatcactatgtttctntcttcatgctttgcttcaacagaaaagttgtatttcctgaactctgaacaaacagtactggttgtcgttctgaattgaactgtaaatgctataccactagacttgatcgattcgtttctagcggcatgctaattgttccattgcagtttcaggttccctcagtaaaacgccaagatggttaatttccggaagagactgatggcggaccaattggaggagtggaaagagtatgttgattntgaactctgaaagttccttaacattttgccatgtggatgcactgatctgaatatggtataagtgggtcgacccgcgaacccacttatttggcctataagtgggctggcgggttggcccacttacaccgagtgatatgcatataataaatgtatatgtct

SEQ ID NO: 74756 - DNA, 339 bp, Oryza sativa
agtctttctctttccagtcctctcctctctctggagtttagagctatgaaagaaacgttgttgggttttaatcctgattgagctgatgctttaaatggattttttcttgtgtgtgttctgtaatcctttccatacacaaattacaacactttatatatatatatatatatatatatatatatatatacagagttcaatcagaaatcagattttctacacacggatttggcacgaatctcaaggtagaatcggacggtggatgcagccacagcaccggtgccgaagagaggaagaaagggaaatcatatccgagtcgtttgctgtctgcgacaagcaaaa

SEQ ID NO: 74757 - DNA, 468 bp, Oryza sativa
  unsure (1)..(468): unsure at all n locations
tattaggacctataaaactcagcttggatttagctcctataaatctgcaatcttaatcaaaatggagatatgcacanaatgagctattggaaagaaaggaactacgatatcttgcagaatatatttcaaataaaaagatagttgcttattcgttcgagaaaacaggttatcaatttggtacagatttggcttgaattttacattttaatgctagttggtgaaccgtccagtactctgatggccatattaataatttccccataaaaaaacataaactaaattcaacctcggacactcaactttatattgcaaatctgaaataattttactgcattagaaaaatcagaagatggctgcgagtaatattagtgtcagttggtgaactgttgagtactcccatttccatatatattaatcattttcccatcgaaaaatgagaaaccaaatgcaaccactcaactttacatt

SEQ ID NO: 74758 - DNA, 429 bp, Oryza sativa
attcttttgtcgtcggttcgtgcatagaaacttaggggtgaaaacggatcggattctgacgaatattattcataccatatcctataccatattttttaatcggattcggaggcggtgcggataatgtgcggatgcggatgcggagcaaattatttcggatatttgaaatggtgcggagtggttgcggactcggctcggaaatggatgaaaataatcggatgtgacatgtatatacaatcgatataacatctgatcatctgtacaatgagcaacaatgaggtaccaatatcacaattcgtatgactcatgaaagcaccgatcacatcataatataatggctagttgttaacattgacttgtcttctgttcaaaagcatgtaatcaacacatacagtattgacatcacgatatatcacattcacataacac

SEQ ID NO: 74759 - DNA, 454 bp, Oryza sativa
  unsure (1)..(454): unsure at all n locations
cttcaaatatttanaaataagcgcttcagagcatatgtaattagtgacaaaattaaaaacaatattaagaggtaggtcataatggatctatcaatcataccaaatttttgtgcaaatataacttatatatgacttatataaagagagattatcaaaaaagagaaatgttgttaggcagtaaggggaaccgctttcaatagttcaaggatataaaacgagataaaaaattatttcaggttttatgtgcttcaccaaatagctcaagagagtaaagtggatttttttatatatttaccaatataactattcactgtagattgtaatatgtcctaaagaaataaaaaaatcaaattttatgtatgaccaaaattagaaatggtcaaaatggtactgcttatatagaaataatactcatttggtcacaaatnttcataaatgttttaacccctactta

SEQ ID NO: 74760 - DNA, 377 bp, Oryza sativa
gctattacggacactatgaaactcagcttgatgcaagggcctggggaggcacgtgtcactttttgcgtgcagcgtgccagcgactgagacagaatcgatgctggtgaatcatgctaggtctgggatcatgcaagactcgtacttggtggagtgtcgtggttcaggactcgggcacaactaagctgcatacacatggcacgggtgagatcaacacagagaccatgcttggaaccgattgtgattggactaagagctggttctattagtgatcaaaagccatgtctacccaaaatagatgctgcttggattccaccggattgcagagattgcactctatttacaccttccacagccatgaggagatcggacccgatttc

SEQ ID NO: 74761 - DNA, 398 bp, Oryza sativa
  unsure (1)..(398): unsure at all n locations
tagcttgatagtagtatatactattgcttcttcagtatgatacgaataagcatgcggcttgattcgatcatatgaggtagtactttcttttctttctgagagaatcagattttttgttttgtttgcgacaaagagaggaatcatctttgatagataaggaaatatgggcccttgggatagagccagaaaggaaaagtccattttgactcccttaaaagtcggccgaatctaattcgtgccccttaaccacacaacaggatagaacgactctccgaaatattgaaaccggtatactttgactcccttagtggttttggaggtgggtttcnctgatgtggcacttactttgcagtgtttactgggttttccttccacgtggcgctgacgcggcgcctatg

SEQ ID NO: 74762 - DNA, 362 bp, Oryza sativa
ttacagagacgagaaactctcaagaagaaaaaaactcataacaagacgcgcacaacaaaagatggaaacagtaactcacacaccattcccataattcatatcacgcgctctacacaattccaataagtgttctataccacgcgatgaaatattgtgaaagaaatacaccaacaccatttcaatgacctaaggatcacaagagatcaacacaagccacaagaataagttatcctcatagcacatctctgtctaatatgatagcggaagccgatatctacaccatccatcatcatttaagccacaaaaaaaaggagcataagccctcacaaatttgctacagcaagacagcaacacgaacctaa

SEQ ID NO: 74763 - DNA, 408 bp, Oryza sativa
tgacttcagcagcaggtgtctgcactctacaggctaacctttacggcagcgaccataccaactttgatataacagctccaactaggtagatcttcagctctggtgtgggggaaaagagagcatgactgagtactacccactgtactcagcaagtcataccggaagaggaggtatgatgcatgatataaccaaaggaagcttggggttcttttgcataaagcatgcatttcaaagcatttattgaaagcagtaaaacaactgtagtaattaatcaatattaaccaaacactgtccaacgctacaccacgttgcaacaggcccaaccaaccatctgaactacaccagttcattaagctaaactacgggtgagactaatcacggtgaatctggttgatcgcccataaccgc

SEQ ID NO: 74764 - DNA, 424 bp, Oryza sativa
  unsure (1)..(424): unsure at all n locations
tagcttatatggataaattaaatattatataatatagagaaaacaaataatttggaagaaaatttaagcaatatcggtgaagaaagttgtcaggaaatcattttttctataattatatagtacaacacagacaatcacaaagcacgcatactcatccctatgaacacacaaacgcaaaccctacccctatgagcatcttctaagagtggaccgacaatcatattttntatcgcaacacgaataaatcaattgatatttttcccaaatagtttctaattcaacttaagatgtatgcacacgcattcgcgcgggctacctttctagtgttcaataataaaacatacacattatccccacaaaagaaacacacatattatcacaatatatttaatattataattaactacactaaattcgttgtata

SEQ ID NO: 74765 - DNA, 434 bp, Oryza sativa
ggagtaatctatcatcaaggatcttcctctgatgtacattttataagccctatcgtctttgcgcgttgtgagctataacggctaccaattcttgggagttttgtatcattagaagatttggacactgaaaggcatgtattatccttctttaaattccatgttcctgtcttacttttcttacactatctcgtcttcctcttgctcttttacctatgttgccggtcgagatattgctaaagtaattcgcactggtgttggaagtgggaactcgagtaagttctttattgcaattgttgattatttgtatgttttcggtgctaattatcccatatcagcagttacattgtcagaacgagctccttggcattacccattacttatggacgtatagtagtagccactactttgggcccttcattgtcataactttcatt

SEQ ID NO: 74766 - DNA, 429 bp, Oryza sativa
  unsure (1)..(429): unsure at all n locations
agcttgattttatganttgttgaccttccctatccaaaagaagatttggtgatcttccaaatacaaaaacacttacaaaattaagagtgtttctgccataacttcgtccgtcgttgccttctgtgtgtcgctgagtcatgtaggtagtattgcactgcttaatgattttcatgaatataatcagtgtatttgtcaacccagagaaaacccagcgtattatggtgagatcatgagtttaactgtagaatgatcttagcttggaacttgtaagaaaatcattcactgtggtctgcatatctaaaatcaagggcagctatgctcaattacagaactctgtggttgatatatttgggcactaagaaactcgtgtntatgtagtccatttcatcctcctaagagggacatttagtttgcagagctacttcatct

SEQ ID NO: 74767 - DNA, 459 bp, Oryza sativa
  unsure (1)..(459): unsure at all n locations
tctggaaggaagcgctagggagaagagaaaggaggaagactatggcgttntgtgaaagggcaatttcaaggcgtgaggggttcgcgtgggacggacgctaacccattggacagaagaatccagaaattctcatactgggccggagttttatgggccgtaacgcccaacaaaaagttgaggcgggaccaccaccaccagcggaatgataagtgggcccacaaactgacagggaaacgacaggggcggccgcgcttgaatgctctcggaaacggacgttttctctcgggtcaagactgccacgtgtcgacaaaataaaccgtcgattccgcatctgacggcagagcgccactggcagcctggcttgtncggtctctttcacccccggcgaggaggcggcgagggcgacatcntctctttctcctcctcgtcttcccgagtttgcgagctcgtctcgtccat

SEQ ID NO: 74768 - DNA, 404 bp, Oryza sativa
gactgaccatgatcgtttattgagagagacctaatgtggcgccttatatagatgtctggatcaaccgagaggaactagcttaccactcatcaaacaggtgttacattaccttgctctgcattctcacaactgccctctgtgggagagcggtccccgatagccaccgatagcatacaagagcctgctgatgtttacaccccacagagtcctttcactgcttataggcaccctgtcaccacatagcgtgcaaagaagcaagcctgtgtatatacaccacgccgaccatctacttctgaaagacgagctgtctacacacggagagctgacatgaccactacacatgtgctctctactggagaaagacgaatctgtaccagtgatagtgttcttaagattgacgtaat

SEQ ID NO: 74769 - DNA, 452 bp, Oryza sativa
  unsure (1)..(452): unsure at all n locations
ctcagcttcctttatagattaanttccttacccgaatatagcaagaattcgactattattgatgtgagaattctcttatgggcttaccaaatttcactgttaacagctgccacccacaccccccccgcccaaaaataaaataaaatgaaagttagcacatccgcataataaaactaaatagatcccatgcacttatattctataattcatccttcaagcatggcaatgtgcatatcacatatatccatttcactcaacaatgttgcatgctccttgcgtacatgcacaagaaaattcaatggacaaaacacacgtgaacccaacctcctagctgatgggtagctctttatcctcaccattccatggggttggaaccaccatagtcgattggggcgcgggggggggggattntanacccatctcttactctttgtacttccataacttctcac

SEQ ID NO: 74770 - DNA, 434 bp, Oryza sativa
  unsure (1)..(434): unsure at all n locations
agcttacttccaactgctcctaacaccacatatgagaaggacgttaatctcagagaagcataatagttttaggtttggcatttaacattcagattatgcgtatatgcgtgaacttttttcataacttcctacaacaagcaagctgccaagacgcaatactatcaaatacttgacaaacatgcaacattaaaacatgacaaattgtttcaaagaggatgaacaacaaagaaaataaaagaaaaaaaatcattgctcctatataccgctcagagggccatctttggtcgttagctggcattgctaattttggggttttattgggagagtagtgggctctgtccncttcgagctgagtggagtcgtactttccgggcttgtttcctctggtcttttatttccctcctctctcgacataagtcaggctggcttaatgc

SEQ ID NO: 74771 - DNA, 455 bp, Oryza sativa
  unsure (1)..(455): unsure at all n locations
ngtcttcacncttgagagccaggctagccgccagccgccatccgctctgctttgtcgtcaccactcttcggccgctgatttgcagaccttnttttctgagaaaaggcacaaagcccagcttttactaaaagcataaaaggttcacaaattgctggggattccagcttacaaacaaaaggcacacagtcttgaaagaaagcgaggaactaatgctgatggcacagcagaacaagccaaggatcgacatagaagcatagaagtaaaagttccatgcaggggactatccaagagatgttgattcttcagttcgccatcatcagtttgagccttctgtctcgcgaatgctggcaagcaacaacccttgtacagtctccacctccccccttatgtttaccggagctagccttttccactgcgttacatacgaaagagctttataaggcagagaagaaaca

SEQ ID NO: 74772 - DNA, 394 bp, Oryza sativa
  unsure (1)..(394): unsure at all n locations
atctctaagtcgactgcggcatgcaagcttctttgtctggttaggtgaagtatgcccgacagtgaagggcagcgcgatcctttcttgcgatgtcactatgatttttggtgagataagctgcgacagctcggtggaggtgatactctatantgacgatggcatggtggcgatggacacgttcatgcggatgaagcataaactgtctcctccgcatgagggtggtgcttggtgacatgaacgcagctggccggactaattctgtccacttcctttgctcatggcggggcaagagagcctttacaatggctgcagcatcaacgacagggcgtggagggtcccaatgtttgatgtgatgacgacaaactngaagctagtcttccaatctcttcttttt

SEQ ID NO: 74773 - DNA, 451 bp, Oryza sativa
  unsure (1)..(451): unsure at all n locations
tgtcggctacatttacttctcaagccaacgtactttcagtattctttcttctgtcatttgggggctatataacctgaaactctagatgcttcaacatgtgttttcagaagcctgccttgtgactttggaaacctgatcagcctaaggaaatttatagcgaanaattttcagtatctcccacgagaggattcacgcatgcagtttctaagaggagagagaatcaaagtgttgaaatatgtaaatcacgtacagggaagtttgcttgtcaatttgcctggtctcaaaagtaaaaagaatattggccttactgtgttgaaaaaggagaataatctctactctctccatatatctcaatntgcagaggatgctagatatgaacaggaacaattggaagtctgtgaaaacctacatcctcatccggatcttcaacatttggaggtcactggttacc

SEQ ID NO: 74774 - DNA, 355 bp, Oryza sativa
tagcttctctcacatgctggccgccatccgataatctccttggctgggagaacgccgtgcgccaccatcttcttcaagtttccctccgtcatgtcggacgacgcccattggccttcaaagctttctttttcttccgccatcgatttgatccgaatgagctgatttgattctagggatggctggtgagagatgtggaattgaagcggtgagtcgcggggaggattttggtgaactttttggaggtggattggagcggaatggtgaacccttatttcgtcggcgcagttctgtactatagcacggaatggggaaaatggcgagagttccggcggggaagacgaagcgccgcttagac

SEQ ID NO: 74775 - DNA, 447 bp, Oryza sativa
  unsure (1)..(447): unsure at all n locations
cggctaagcactcctagaccaatcatctagtctttatntttatctcagaatatcaatgaattaaggtgaacaaaggctgagtatgggtagaaaccatcccacatgacattataaaagtaatgcaattttgaaagaaaagcaggggtgtttgcaaataggctcaatatgatcaatgatatctgtatgacttgccttgctcttcaattgacgggacctcggcgaccacttcaaaataaaccggaacgtcagaagtgccggagtctaaacgacaaacaatgtacacaataaatacatgctaaaaagctactgaaacaacaaaagaaaccaaatttaatggattcttgacatttaacgaattcactgccattttgatgggttataacggagctcagattataagctatgaantttagaagatgctctgtgctttactattaaagaaaacct

SEQ ID NO: 74776 - DNA, 420 bp, Oryza sativa
ttttgtttgtatataatctcgagttccttatgtgtttaaacatagggaagagaaaggagaaataagacatctctttgtgagaagatgacctggtcatagttttattcatactcttaagatcattcacatttcgtcccaccgataaactatggtggttttttttttttgggtgagtctacattaacaaatcggaatgtcatgtcattggcatctccaatgtatgtattaaatcaaacagtagtacatcgaatcaaaccatgcatgcagcaactaccgaaactgatctattataaaagaaaaacggaacaatcttgttgttgtgaaccatcccaataaagaaatgagtaaatttcatgtgtgtatagtcaaagttacataacacctcacatattatgaatggtggtacataaccatgtatta

SEQ ID NO: 74777 - DNA, 455 bp, Oryza sativa
  unsure (1)..(455): unsure at all n locations
tnctntaatatattaattgtcttaaccgaattcttcaagatttcgactgctggcgacttgataattcccatcggctgatttaaggactctgaagctgatattaatattaagccgatgacgtcttctgggcttaccaaatttcactgttaacaccggtacaattgcctacgccagcggaacgtaggacttaccccttcgctggagatcgatagccgctgcagccccgcgttatgtgccaagttccaccggatgataaataaaaacatcggtatagatggtggcgatgcaccgggagtagttatattgatctgtaagatagtttacaatacccccgggtgtacatatttatactcatgaatagatgctagtcattgttggacaagacagagactttcctaaagataataggaaaacataaagtccttatcggacacttaacacacttttctaaagat

SEQ ID NO: 74778 - DNA, 425 bp, Oryza sativa
  unsure (1)..(425): unsure at all n locations
agcttagcaagtgttatccgtttcatattcattccttattagtttctcaaacacaacttacaatacatatccatgcaaatacacgggctacttcctagtctttataaaactcataatataataactctgaataatgcagtcacgctaaggctgtgttcgctaggggagaattggaacatgcacagtgtacacggaaaacggagtagtccattagcgtgtgattaattaagtattagctattttttcaaaaatggatcaatatgattttttaaacaactttcgtatagaaactntntgcaaaaaacgcaccgtttagccgtttgaaaagcgtgcgcgtgaaaaacaagaggggagtgctgggaacttgctcttgcaaacacagcctaagagcaaggctaataatacagccagctgcttactgtata

SEQ ID NO: 74779 - DNA, 452 bp, Oryza sativa
  unsure (1)..(452): unsure at all n locations
tgtcgaaacatgaattcggcaataataaaaggtggtagcgctcgagatctaaaagttgatggatgcggagacaagggatttagacagattcaggccctctcaatgagagataacacccttactcctgtttggggatttgaatccgccgggtgtagtatagatatgacgatcttatgtcctcatgccccctagagggcctcctgcccaccttatatatgatggggggtaggattataagatagaaaccttaaccaatacggtgtcggttttctaaatctactttacaattttatcaaaccagaactttagtccgtttcataatatacaaggaaacgtaatacccaagtcatgatctgctacatatttcataaatataagttacccnctacaccagtcggataaccatgccgtatgggtatggggtgcccataatctccacagtagcccctgag

SEQ ID NO: 74780 - DNA, 428 bp, Oryza sativa
atctttcttatggtatataactcactacttaataaaacatatttacaattattaaataattaatatcaaatgattagattatggtcaacaaatatgctaataaataaaattggtattattcagtagagtggatgtaataatatttgtttctagcatgttttgtcacagtagcaaccatgtaaattaagtacagtaatgtctcatatgaacggatgtatatgaagaaactatcactatttaatgttcaataaaatccatgacttataaattacttacataaagtttagcctcatatttcgtaactaaaatataaacacacatagatgaatctttaacttgtttaggagaataagaacagagctagatgtggatgaatcaccaaatatattaatcaatgcaatgccatatagaaactaactaatgtataa

SEQ ID NO: 74781 - DNA, 400 bp, Oryza sativa
acacaaaaatctcagcttatcagccggaggccgagcccaagattttgttttttaggcgagcgcaactgtctgaaagatgtattaccggagcaacaagatagtacaaccatatggtaggttgaggattgccagtctctacagaaagctaccggtaaccgccgaaggaactcacttttgaggcaggagattacgtgtatcttttgtcattcgctccgggagtacaccgtttcaacaaaggatgttggaccacgcttctgggaccatacaaattttggatcgaagggagaattgtttatagttataacttcatccaattgatcggcttcatgagtgtccacgtgtccattaaagagtgcttatggtcctgaaaacagctgttctgaaccattgttttcataga

SEQ ID NO: 74782 - DNA, 419 bp, Oryza sativa
agcttgtgttgtctgacaataacttcaccggtgtggtgcctgcctccattggcaagcttgccaagcttacattattgaaccttgagatgaatcagctccatgctcgtagcaagcaagaatgggagttcatggataacctagctaattgcaccgagctacaagtactctctcttgagaagaatcaaatggaaggacaggtaccaagttcactatgcaatttttcagttcaacttcagtatctttacctgtggctcaatagattgtcagggagttttccttctggcattgcaaacccttcaaacctgataattctggcactggatgacaactggtttacaagttctgtaccacaatggcttggaggtctcataacatagcagagcctaacagtgtcctacaacaatattacacggtatgtc

SEQ ID NO: 74783 - DNA, 442 bp, Oryza sativa
  unsure (1)..(442): unsure at all n locations
tatgtggatgacgtagtcgtcaagacctagcagtatgatgttttgattacagaacnagaagaaacctttgcgagcatgcgcgctttcacgatgaaactaaaccctgaatagtgcatctttggagtaccgtcatggaagctgcttagatttgtggtgtcccatagaggcatacaggccaacccggagaaaatcaacgccatcctcaacatgataccgccgagctcccacaaagatgtccaaaagctgactggttgcatggcggcgctcagctggttcgtttcacgactcggcgagcggtggatgccattcttcaagctgttaaagaaagcatactattttcagtacggaccccgaatacataaagcctttgagacttgaagaaacttctcacctctccaccaattttggcctcatcacatccgctagagccgctattggtata

SEQ ID NO: 74784 - DNA, 269 bp, Oryza sativa
ggcgaccttggatgtcgagaccatgagccgcactccctgatcatcggatcctagtacgggcctagaacagacctgcgcgcccattctgagcataatagatgtcctgcctgaggtcactgctgatgatgatgacgtccgtggcgaagaataacacgtaggctgccgacatcactgcagcggagatgaaggttatgctgaccgcgagcacatgcgtcgacgacgccgacgcgggagagccacgtgaacgggatacgaataactcaccatct

SEQ ID NO: 74785 - DNA, 419 bp, Oryza sativa
  unsure (1)..(419): unsure at all n locations
tggaggtcaaggtcgcggtggtgtgcacgatttctcgttgaagcgtgcggcgtgccggcgacggagacagaagcgatgctggtagtagcaggctcggtctgggttcatgcaagacttgacttggtggaggtcgtggtacaggagtcgggcacagttcgatttcaatacacatggcacggatgagatcaacaaggagaccatgtcgggaacggaaggggattggacgaggactgtattcgttntggaatcagagtcaagttttacccaaaatagaagcagcagggattccacgggattgcagagattgcaatcgaatcaaaccaaccaaagcaatgaagagatcggacccgatttctttggcggtcggggtttgggcgatgaactgcgagcggtataagcacggcttggcgtattcgtcg

SEQ ID NO: 74786 - DNA, 419 bp, Oryza sativa
  unsure (1)..(419): unsure at all n locations
agcttaatacagtctatagcatccacaattgattgccaagaagcttaacgcatacttgaatacaggtccaataagacaatgagatagtcagaccttcttcccatggtcattagttttccaccttccactttatctccaccaacgctattggcaaggagaaatcctaaaaagagcatagcattattaaatttaacattcctaggggaaaagggcaagagaatttacatgcatgactgnttgcgaacacctaaacagtacgtgaacagagaatggttaattacttaaaccatntgcaatgaaagagcatgtcagaaagaataaccacatgttaaaaaataattaacacaacttaagactgacgcatcacacacattactggtcaccaccccacccatagatgaacttcatgaaattgctac

SEQ ID NO: 74787 - DNA, 460 bp, Oryza sativa
  unsure (1)..(460): unsure at all n locations
cggacctatgatactcagcttgtgacatgctgcaccggaggttcctacgcataaatcactttgtccgnaagatgaaggcggagttcgatggtactgaagagactgatcctgcaccaaaacctacatcgggagaaaaatgtgtgtgcaatgacagataaaattgtttgcgagtttggaaaaatgactaagaaaccatcaaaggggacaaagcacaagaaacccgagaagaatacgaatgaagggatagttagaagcaagatgacagttcgaagccagatgataaactccctcccccattcaagaagcattccatattttttaagtacctcccgtactggaaagatctggatgatcggcatgccataaacgtcatgcatctagagaagaatgtgtttgacaacatagttggaacattgttggacatgccgaagaagactatacatggtctgctatcaatgat

SEQ ID NO: 74788 - DNA, 409 bp, Oryza sativa
tagcttttgttcaaaagcaaagagcgaaatgtgtagggagcttttggtccacaactcaagaatctaataatatttttacccatcgcaacatacaggtatttgttctagtgaaaactaatatccaccgaccaaatctagattagtctaaatttataatagaaattaagcacgagtaacgcgttgcacgcatggaacgatgaaaataagcacgatgaacacgtacatgattgcacaagggttagctctgatcgaaccaccacatgcacgctctctcgccaacatgcagcttataagcatctttagtggactaaagatccggcctgacaccctctagcaactcgcgaaccgacactaaagatcatatagttctgttggtccttaaaaccacgactaaataatgacgattagt

SEQ ID NO: 74789 - DNA, 438 bp, Oryza sativa
  unsure (1)..(438): unsure at all n locations
tgcagcctantgtgcacagtagagagtctaatggttagatttcattgaatcccgagaaatgctntccttctagcctttcgtaccacgtggggtcacgtactaagcaagccaaaggctagaagagtaagaatcataagagaaaaacaccgatgcgaactgaagaagaagtacgtatgatgactactaccagcaccgaatggcctccagtagggataactatttctagacgtcaaagaggaaatacctttcgaggtgcacgacagttgacccagcacctcctaagccatggtggcagagtatctgatagtgaagggtcagatcaagtctcctcggatgatgaagatgagtctctccgacatgtctgcgaggaagagatggaatcaaaggcctgcacccgttgtggagatattggacacgcttctagcatgtgtctcacac

SEQ ID NO: 74790 - DNA, 394 bp, Oryza sativa
agcttgttgttctatgtaaggcttaatttgggtatagagtgatctacctatgaatttaacttgcacaatcacaaataatctaaatatatgggagtatagtgtatatgcctaataaagagcgatcgatcgaatcatgcaagtatgcatgcatctcttcgccaaaaagaaaaaggaaataaaatacatcataaatggacggagctaactacagaggtgagaacagaacaaaactatatatagctctaggtcaacgccctggaatttagcacgggaatgtactaagttaacactttgatgagttgagattacgacataagctagacaagttgctcgcagccactggttgattgattgctttcaagcattttgtgtttctttaaaaacatactccaag

SEQ ID NO: 74791 - DNA, 492 bp, Oryza sativa
  unsure (1)..(492): unsure at all n locations
gaccttaaatactaacttatccnattcaatctcaacataagctcgcctgccaccatttattgttttctttncgaatgcctagttcagttagttagctcattatctagtataatgcatataattggttgtggtactgttccttaaacagtaaagtgcactgtaacagcactcttattatagggattgtaaatttagtgttatataattagatagttgcctattcagtttataactatgctataggttccctttaattagttcctaccctatgggctctatcacctcttttttttcttgacgctgaaaggtagagagactattccttataaccattttatttatggtgggggggtactagcaccttatatgaagggaatttgtttaatatcgggaacaataagaaatatcagtgttcccacctttgcttaatgattatctcactacatatacacctatacttacatactgtctgcctacaattaacttgctgat

SEQ ID NO: 74792 - DNA, 384 bp, Oryza sativa
gagcttagtttataacctatcgggatgagccatggcaaaaactctatatcgattaaaattcaatgaagaaaacaatgctccgattccacttgtatgaactaagccaagcagaggggggggtgaatggtttgtatacccacaaaccaaaaacttttagcggaactaaaagttaccctcgaaatctacggatcacggtctgaccaaaattgttctgccggtttgaccgcctggatgccgttcgtctgaccgcggttatatctccggtccgaccgctgatatcagctgctgctcgctgtcgccgacgccggtctgaccgccgtgctcccgcctgtttgaccgccgtaacccggtaactacaatcgaaaacttttaaggtatatgatg

SEQ ID NO: 74793 - DNA, 345 bp, Oryza sativa
agccttgctatcttattactatcggttggctaagaaagcaacttcctcaattctaaggttaactcccgggcatacctgagttgcccttatattcctgccaggggaatgtactatcattggtacacgtcaattgtgggttgttcaaacatttcttttcacaaaacttgtgatatgaaagaatgggaagctcctgaatcaaacagaactattgcgggtactgagttgacaaggaacatacctatcacaacgtctggagcattctaagcggtctcaccttgaatgtggttcacccggcctcgaccaaattgtggacgcacaaaaccttgtcactttctgaaactagac

SEQ ID NO: 74794 - DNA, 398 bp, Oryza sativa
  unsure (1)..(398): unsure at all n locations
agcttcaaattctactttcaatttgctttaccgcttcaacaaatcacactaaggtgatcttcggaagcatatcaaactcttgctatccctcatcatagatctatccatctttgaccgggtacttcgccaacctatacttaccaacgactagatccatttattggacctagctcaaagttcctggcctctagtgccttcgctcatcgacgccatccattaaagatagtgaagaaaaggccctccaaatgccacatacctttgttctcctggtacgaacacctctggtccaacaacacttaggccctaaattcagcatcgcttcctaaccattgctggcacctncaacaagcctttcattttgctcctcccttgctcactagaagaacgttggatctgag

SEQ ID NO: 74795 - DNA, 466 bp, Oryza sativa
  unsure (1)..(466): unsure at all n locations
tcaaggctatagaatattntggactatgacattcacgatcttattgtatgtgagttatcaagggtctccacgaaccaaatgcagccaatataaatggctgatatgtgaattacaggaaactatatgaataataatgcatcaaatatgcattttcacctatttagtcgcttattgccaatgcactcaagcccacgacccaacacatgttactagtacagtactgaacctggattgactttagtgtgcaacaatgacagcgacattgccattgacatgactatgcacgacataatatcatgagctcaacaaacaatacacacataaacaagcatatntatgccctcttttatactattattaaaagactgacatgtgacatgtgagccatcaatgttctgtctgctttaatactatgcaggtgcgtatgtacagctctatcatttctaagcatggtaacatgatgatc

SEQ ID NO: 74796 - DNA, 374 bp, Oryza sativa
  unsure (1)..(374): unsure at all n locations
tttcttgttacttcattaatcgatgagtacgccctgctgggctggcgcgccatgctgactgaagtcaatctgtcaccgaaaccaggcctcgtggatcgcattaactgcggtgcgcacaaagatatggcgctggaagatatccaccgcagcgcgctggcgattcagggctggctaccccgtttcattgaatttggtgcctgtagtgcggaaatggcaccaaaagcggtactccacggattacgcccaattggtatggcttgcgaaggtgatatgttccgcgccactgcgggcgttaacacgcataaaggcagcattttntttttaaggctgctatgtgcggcaattggcccgttgctttaactcaacccacccgt

SEQ ID NO: 74797 - DNA, 250 bp, Oryza sativa
caagaatagccgctgctgtcgccgggctttctggctgataaccccaccaacaatgtctttttgcctttgcagaatctacccacggtcgcgcctgctgcaaaactgtgtacaaatgggcagaacgatcggcgagaactatacatgacggcgcatctttttaccgcgaggagccaggggatggtcatccgtgcacattcgcgtccggtgtgcggaaatttttttcataaggggtactcagtttcaccttctc

SEQ ID NO: 74798 - DNA, 334 bp, Oryza sativa
  unsure (1)..(334): unsure at all n locations
agcttatccctaagtgacagagtttaaagaggatgcggcatggcagtttatctattaattaggaataatttgttagtttccttttatctttaggaaagtgtgtttattgtccgataaggacttgtatcaacccatgggtataaatatgtacacaccggggtctatgtaatatcttcacgatcaatacaattcggcgcatcgccaccctttttacttctacttttgtttttaagttccggtgggacttggcacccgacgcggggctgcatcgtcttcgatctccggcgaaaggataagtccaatgttccgtcggtccangcaattgtatcgtcta

SEQ ID NO: 74799 - DNA, 386 bp, Oryza sativa
tatgttttttctatctggcttatcaactccctgcgtctttaattaaaaatagaatattatcagtaacctattatatgtatttcaaaataagcttatgtttagaaaataaaaaagatacaatgagagtagataaaatgaaaaatagttgcattgagaaacttattgtgggacacagaggatatgctatagagtacatatgcttgtgctcatgtcactcatagtcatagagcttaattctaggcactactagtgtagtactaactccgtccaaaaatatagctatctagtacggtatgtgacatcacgtccaaattcatagtactaggtgatgatgttacattcagtactaagtagctatattttgagacgacagaagtacaggtttt

SEQ ID NO: 74800 - DNA, 415 bp, Oryza sativa
  unsure (1)..(415): unsure at all n locations
atcttagntaactgaactttacactcttgataaccttattattcagctgctggtagtagagattgagatgcaaaatgagatcgatcttataaaaaaataagaacgaattaagttactgacctgtgcacataaacattgtaatctctttctttgagatactcctttataatataaggatcctgcccatcgagcacttctggagcattagcagctgtgcctgttgagatggcatatgccatttgcacggatccacctccgagatcaatcactcctacagttttggagtagtcacctcctaatctatccagcanatagttaagtgcaacccacatgttagatccttcttgagatccactaagaacattaatccacgttggattgtatttgaacttggtcttggtgtggacaacatctc

SEQ ID NO: 74801 - DNA, 364 bp, Oryza sativa
atcttattgatcatactggggaaaagcaatcctgcattataaatacagacatgaagtttaaagattgacgacacaatgccatttttatattaataaagattcatttatgcgaagattggtcttcgtcgacaacaaagtaaaattgaagtctcataaatgatgcaagaattctggaaatgtacatttcctctgataagcgatgaacactttatcacgggttccgatcccctataattagactactactctaccaagtggagttgtcatgatccatgacattccgtatacttcaaggggtgggaattaagccggcttatatttcactacgttaaaagtatgaacctaacattcaaaaaaaagactt

SEQ ID NO: 74802 - DNA, 363 bp, Oryza sativa
atattatgacacgacaagtgctttgaaggaagttaacaaagaaaagataaacaaagtgcataaaagttgcatactccgactcgtcatgtatcttggcaaaacggaagccttcccgatatgcatacctgtgcccctctgatgagaaattacgagtcttccttccacattagattcacgagaggtcttcttcattgtctccaagagaagatgagtcaaaagaaattgacctgaaaactatgacaggagatacacattttaacgcaatgatacacagctctctccagcatgtttgagagaaaaagggacacatgttaactcaatggtatccgcaactatcataattgaataaaacattgaggaaca

SEQ ID NO: 74803 - DNA, 382 bp, Oryza sativa
tttcttttgttgcagcgggcccaccatccacgtcccaccccagagcttgtcgccggcggacacgcgtcctccatcgtccacgtgggcgtggctacaggggcataatggctgtctggctgagccgaatgaggcctaagaagtacttggactgggatttgagaggctttccgcataagttgtgagctttgtttctgagaggaaaagccgaaaaaggttgtcgcagaagaaaggagaaggaaaaaaggccgcttggaattttattcacatccctcgaagaagacagctccaaagcaggagctcctcttgttacagaaatataaggtctgtctgaagctccaatattcatcattatcatcaacctatatttctatctgatgacaga

SEQ ID NO: 74804 - DNA, 502 bp, Oryza sativa
  unsure (1)..(502): unsure at all n locations
tacagcacagctagtgctcatataaaggatcaagatcataattatatagaataacaagttggaataactcacaatagcatgtacatgacaaccataatatatacaaaatagaaatgtgttccaacaatgaagccaatgttaaaggttacctgtagacaactccaatgttcggagtcaatgactgaatcttttgcacctgaatttgcatataactatgtattagtgcttctgagaaacaaacaacgaatagcatgtcgcaactcactaaaagaggaattcagcattaagagtgatgttagacttacagatgtttcatcgactaaaatagaaagcaatttcttctcagtggcgataactacaccattagcagctgcaaacataacaaatatacctcagaatcaataaactangctaaaagggaactgaagagaatcaacagactgtagtctctgagcagttactacacataaacatatgattgaacaatcttggtaaaacatat

SEQ ID NO: 74805 - DNA, 355 bp, Oryza sativa
tgcttcaactgataaatctaatagttcagtgtgccatgcttctgtatctgtagataatcttcgcatttgtctcggctgcagtaaagatgcaaatttctaaaagaacaaacttgatcacagatgccacctacagctgtaatagcaccggaagcaaaggtttcaatgcttcacaatacatggttggccagcttctcaaagagacatttctagatcttgggcctacttttgttaaaggtcaggttttcaggttcgatagctttaagccatggtagtggccactcggttcggattaatgatgacttgcttgtcttctgtgtgcagttggacagtccctctcaacaaggcctgatatcac

SEQ ID NO: 74806 - DNA, 469 bp, Oryza sativa
  unsure (1)..(469): unsure at all n locations
ctcagcttatggtcggacttgtctgcgatgtgtattttatggctttatcattaccagatattatttgagataaggaattccagatgaatgagtttgtggtgcagctaggtcaggtcagccaccagaactatgcaatntgcttaatgatttctgtatctcatgcagtcatataaaattatgcctaaacatgtcttttgattaagtgcattgatggccttgtagttggtaatcaatttgcttaaaattctttgtacgaacactgcatggcaacggcgcaagcttgtgaagagtttgcaggattggagtaccatcttcatacaggtttgtgaaacagataatggtattactgattttnttaagattatntttcccttatggcttttggtaagtaacgaatgactgtttctaatctaacgatgcatgtatgctgagttgggctgggctgtcccacttgccctatagcactcat

SEQ ID NO: 74807 - DNA, 366 bp, Oryza sativa
agcttatttatttctttactgcgttcaaagcatgaacgcgtgatttgtgtccttttccccctactcaagaagagttacattctaagatcccgatcgtgatatgacaaacaaatcttactttttctttcccaagctggcgcataacctctggaccgataagaagatcgatgacccgcatcctacaacttcaaagaagtatttgtatcacacccgagcaatggaccggtgaaggagtttcattcatttacggagtttggaagcgaggatgatccaagaacgactgctatctgaagaagtgaatggatctgatacccattgcgtctgattgaccttctgactaccctacttgggctttgcgttccctat

SEQ ID NO: 74808 - DNA, 349 bp, Oryza sativa
  unsure (1)..(349): unsure at all n locations
gattccactgccaagcttcaacagctggtcttgtctctactagattgagctgcccctgcaagtctgactatgcaccagcggcattgaaggaaataaaaaacctgataattgattagccagatcaaagatcaatggggaaactctcactagctggctagaacgatgttcgttcttacccacagccgcaaggggcgctngaagggcactaagatccgctggcaaggaactgtgaggagatgagattctcttgccttatttataaagtcaatatagagtttgcgcatgcatatagtagggcatacctttttatgtgttgtatctcctgcgcccttttcatgatagatctttt

SEQ ID NO: 74809 - DNA, 355 bp, Oryza sativa
agcttgggacatgatcgaagttcgcggcttgaaagatatgtccaaggacatcaattctagggcccactttgtgatccgcacatttgcttcgcgattatgaagtatgttcccgagtggaaacgatgtgaccaccgtgaccgagtggccttggaagtagtgagatagtttcctgacggtaatcaaaacaccatataatagcttttggacctgaggatatcttgtcttggagtcggccagaacctcgctaacgaagtagattggtcgttggactttttgaatatggccttcttcttcacgctcaacaaccaggactgtgcttacgacctggaaagtcgccgatacatataacaacagc

SEQ ID NO: 74810 - DNA, 382 bp, Oryza sativa
  unsure (1)..(382): unsure at all n locations
tactaagcttatatgagctctngagtggtaagaagcctaatgtnncagtttttcttgtctttaggagcaaatattttagtttaagtaagaggcctcgctcatctaagttctcaactaaggtggatgagggattcttacttggctataaatcaaatgcacatgcctatcgtgtcttcaacaaaacctccggtattggtgaagtcactagagatgtgacatctgatgaatctaatggctcccaaggggagcaagttgttgtacatgttgtacgtgttgtggatccaagtcaaactatatgtactaaggctattggagacatacgactagtctatacgcaggatgaccaagaagatatggatcaacctccgtcatcgacatccaa

SEQ ID NO: 74811 - DNA, 325 bp, Oryza sativa
gcttctttttttttggtactgacgtacctgtaagagattcttgcataataatcacaaagcctatgtggtgagaaacttcattaatattggtgacattatacattataaagttggttgcagaacaaatatttctaagcgtaactatgcttgacaaagtgatgccatacgcagaagaacctgtcatagttctaattatattaataattaggagcatatgaaaatgtgccactgataagccactgacaagccctcaagcatataaaattttattctataaactagaaaagtgagtgccaaaaaactcttacttgcctgatatatggct

SEQ ID NO: 74812 - DNA, 96 bp, Oryza sativa
aaaaactccaatcagcgcgccaggtcaacaaaccatgcaaccgcctgccaagctaacgttaataccaaacaatagtcattgcgggattaaaacaag

SEQ ID NO: 74813 - DNA, 321 bp, Oryza sativa
agcttcatattgttacagatgaataatgatccccattgcccaaacactggcttagaccgtagcctggataattccatgcctatgaacacgatcttgtccctttcccaggtgcttcctatgacaaggtgactttccgttccgttgctgggcaagcttgcatcgactctgctagtgagaagaagtggttgtcgtccatttgctgcgacatgatgttctcatggaagaaactgtgacctcgcccagactattctgttgccgctcgtggagccgttgataatgctaagcccaccactttgaaataaggttagccattttctctgc

SEQ ID NO: 74814 - DNA, 501 bp, Oryza sativa
  unsure (1)..(501): unsure at all n locations
tctatanacaactcagctnggaaattggaccggaggactacattgctgcaaagcgacatttattgtcgatctatnggngatgggtggtcatatccatcatcttaacttctacactatatgcgaacaagttcattctaaggtattaactctatcactgtttgcatacaacgccatacatgtccatacttgtatggagatggcaatgcttggatgaaaatgatattattaccatatggccatcacccggagagaattaaggagcgtgagagcgtgcgtgatgtcatgcatgcatgtatggtcgatagtcatgaatgggatatgaccattcatatatctgtttntatatagcgatctaattatattggtagatctggatatatgatgactaaatttcatacttggtnggagggatatagcactggtcgagatatgccaacagtcaatgggtcacacttatcatatatattgttctatgaaaacatattcacctggagatttatt

SEQ ID NO: 74815 - DNA, 392 bp, Oryza sativa
  unsure (1)..(392): unsure at all n locations
agcttatgacatgtgtaaggtaatatgtaattctaacatatcaacatcacctcatatcaacatcacctcaggttaaggagagtccaaatataatttttataaatttactagatgcatttatgaggaggaaaacacatatctaaagataagtcttgcgaattatctaaaataattcgtgcaagataaaatcatgggaaaattcatgtaagctctactcaacatatacaacacacagtaattttggtacaattaataaataaattngatacctcaaataaataagtcaaaccagtcaaataatagacttattataattcttaatcgggtaaaaccaaaaaaattgttaaaagtgcatttaactgcatggaagtgtataagggaaataatttatt

SEQ ID NO: 74816 - DNA, 502 bp, Oryza sativa
  unsure (1)..(502): unsure at all n locations
tgatctcactgtgggggatagtatgctgtgtaatatcatagtatttattgtatcagagcattaaccgatatatcttagatatacctcaatggctaagctataaatatatataatcattgtcttaaaggacctttaaacatcagtgatttatactgtctcggctcactgtccgatctaatccaatcgcttaagttagacatatttttagaaaaagattatatatcattgatatctgcagccaatcaagtagatttaattctatcttggttaagattttattgccgatctggttcacatcacatcggcctgatatcaaatgaaacatcatcggcaacacagccgaacggctatcattcgcggacttaattgggcttctntaatttcttggtgagtgcatgaacaaaccaactggcatgctcaaaaccctaaagcacatcttaggacctgcactggacctagcagatctcctaggctagtgtgtggttgttgcataacaatttcc

SEQ ID NO: 74817 - DNA, 309 bp, Oryza sativa
cccgggatctctaatcacctgcagctgcaacttgacatgggtggagattgtttgctcgaggagctcatgtatattgggacataaacctgtcaacactttcaatcttggatgcaagagataatctcttctcttgtgcttcacggcgtatggtcatcaattagacacccctgaagccgagacaatttgagagaacattattgcgtatcaagaatatactcttatcttgggctaaacgctcctgtatcatcttcggtcttaatcaatttgattatccacggaactgattagaccctgcttgtccatgaccct

SEQ ID NO: 74818 - DNA, 432 bp, Oryza sativa
  unsure (1)..(432): unsure at all n locations
gcttgaacatggctatatgatgtcgtatcttctaggattgtctatttcactttacaatatatccgatgcaagtatgccatttcttattccttaccatgagctccacataagccttagtagaatggtatgataagaaaagtcaacattaatgccttggtgaggattgaaacatctttgagcgagaatctagagaattaattgaggagtatataaaagttatggttttatgagcataaaaaaaacaccaaggtaattcatcataagaagtaaaggtgactngagtcgaagaccgctccaatcttcaatcgcccaagatgacatggtaaacacatcaagggtcacaaacacaggtatgtcttggaagttatttttgcgtcatattattggtcacaaagtcataactctagtagatccatgagctttattcatgga

SEQ ID NO: 74819 - DNA, 320 bp, Oryza sativa
  unsure (1)..(320): unsure at all n locations
tttttntaattttgaattagtatacatcagtcctggctggacagtgaacacaagtctctaattaagattgccacatatataactctttatatagaccacgtacccactcatatacataactgtctacacatgcacatatcttaacggttgcagatttaaactaaaataagctgacaacccataaaggcatggcctctcaaatttcgggggctgacaatgtaccaacctccttcataaatgcaacttttgcttgccgaccctatattatcgctctgaacttgactacacttcgattgacacatcttccattcttatgagat

SEQ ID NO: 74820 - DNA, 361 bp, Oryza sativa
ttcttaatattcatatggaagcagacgaggagcttaatgagcaaattagtgtataaaagagaacaactaatctatgaggaggaggagagaacaatgaggagaaagacaaatgagatggagacagagaataggggaatgatgagaacgagaaagacaaaggagaagcagactgagaatgagagcatgaggaggagatgaaggacaaggaataaggaggagaagagaggaaggaggagccgcaccacgagaagcatgagcacaagaaggaaaatgaagtgaaagaagaagagaggaaggatgagcataacaaggagaaagatgagagggaagggacagaagaaaaacaagtatgaggagggga

SEQ ID NO: 74821 - DNA, 388 bp, Oryza sativa
  unsure (1)..(388): unsure at all n locations
actcagcttcaaaagtacgtcttcttcgtaaattatttggtgtctcttcttatattattcttattaagtatttgttatcttcatactatgtaatatttaattcatctctataagtaattaatattttcttcttcatcatttaaaaaggagctaaacttaaaattaaaaataaggtgccttttcttttaaaattgaatgttttgggacttcttttcaacaaatactaaaacatattattgttaataatggaccagattacatatatgtatcctgatcttgcttcccggagacgtgcatatgtacgcactggtagagaaaccatctttcgtctgtcggccgatttccacaatagtcccggatgcaatataaaccggngctaaagatgatc

SEQ ID NO: 74822 - DNA, 324 bp, Oryza sativa
  unsure (1)..(324): unsure at all n locations
ttgcttatcttatctttacagtancgggcgcgtgaagtgaaagcgtaagcgaatccacagagagaaataaggtgattggccgcggaacacaaaggcccaccacggagatgctagtgtacccaatgtctggcgtactacttctggcccctccaatgctgacctctctctctttctctttcctgctgctggtggccatctttatatttactactctacccctggcaatgccctgttaatgtcacattagtttccttttatccctagtctttatacaacgagaagaaaagtctggctgatccatatccattgtaaaacaggccatca

SEQ ID NO: 74823 - DNA, 460 bp, Oryza sativa
  unsure (1)..(460): unsure at all n locations
gtgtgagttccattatataccatcatacaaacgattntctcctcgttgttaaggttccgttcattccgcgtcgttaaatacactgttcatcctatactccctccattcaaaagtttaagacctatttctttgtacaccaagaccaatgagtaatgtattcatccatcatatgacgaaaccaatgaacatgcaaccaataagtactataatgacttcttgggctctttcaaaaatttaatatagcacatagtgactaaatatgatttagaattttggaaaaactcttggacttaataacacggaatgtacgcaaccctaacggtgatggcattnttgggataaaatcatttctacgatggtatttcttataactgacactcgtcgatggtatttcttgtagttggacgttcgtcaatagcatctttggattatctcgtatatgtgtggatttggctaacat

SEQ ID NO: 74824 - DNA, 360 bp, Oryza sativa
aactttccatcccgtatttagcaatgaccggaccgacaccggcatttactaacagacccgccgccgctgaaagcacaaaatacccatgcaccacccgctcaccgaaaatagattcgggagcaacaatcttatccatatgtgcatagaaatgaacgccgctgatgctagcaaagttaacaatatccgtctctgtcattgtgcggtagtggagtaacaggctgtcgcctggatgtagctctcaaaatatctgcggaacggatgaatacgatcttttttgacttttgcaccgcgcacccactgtttactgatagcgtgcaacatctgctgactaccctgaacagcggatcgctgcatgtaatg

SEQ ID NO: 74825 - DNA, 385 bp, Oryza sativa
catggcgatgccctgaccgacaccgatgcacatggtgcacaatgcgtaacgaccggtaccccgatgcaactcatggctggcagccagttgcatgcgggcaccactcattcccaacggatggcctaaagcgatagcgcctcccgtgaggtgaacatgtggggcatcatcaagcagccccaatttcgcgagtacacccaacgcctgggccgcgaacgcttcgttcagttcaatcacgtccatatcgtgaatactcagccctgctcgttccagcacccggcgagttgcatgcaccggaccaagccccatcaggcgcagatgcaccccggcggttgccatggctacgatacacgcccgccgtgtcagaccttgcgctgctggcatctgt

SEQ ID NO: 74826 - DNA, 387 bp, Oryza sativa
atctttacatgcagtatatatgtgtctgcatgtgcaccatgcatgaatggacaaatctgaaccgggaacttcatatatatatatactccatgttgtgcatatcaagatcccctaattggtacatcactagtttttttttctacatgttatttggtcttgctaacatttgttcatgttagaatatttgcatctgtagtttgtaacaaaatgcacctgaattctatttgaatcttcactatatacttctaagcacttgctctgaccctctgatatatacctctgatgctggtgggctccaaaaaagattgtcacgtaacttggagatatatatatgcttgtattgggtgtgacatgtcattggattggatgggataggtcagtaccacc

SEQ ID NO: 74827 - DNA, 356 bp, Oryza sativa
  unsure (1)..(356): unsure at all n locations
acactatagaatatctcagcttggcatgatgatgaaaatataggtacctacttactgtgtcattttctattgcatggcatcaacttattcatttcttcaatccattatatccatctttgttagccgaatattcatatatttccttaattatgacatattatgtcctgtctagaacataagctcaatggacatgtctgaacttaaagttagatatagcaatacttaattntatggcaaaaaccgagacaacaagacttcaatgtgctttaataattctctatcatagaagtacgagatggttccctttagttactaaccatcatatataaatagttgaactaaattacgagtattat

SEQ ID NO: 74828 - DNA, 399 bp, Oryza sativa
  unsure (1)..(399): unsure at all n locations
acactttaatactcagctgccactaagctcacgttctcttggggccagcctccccattatcgatgngaaanggtcattgattagatgcacattttcatcatgcattgttgcctaaccatttcgtttggacagctgatgtctatgggttttccttcggcgtgcatttgcttttagtttgaagaacctgtaatttgcatcgccttcatgaatcgttgttacacgggaagcttgtctttntctttggtaatttgatgttagctagaccgagcactcgacactttagagccgttctcagtcgtctctctgcttgagaaagacatctacattccttggccatctcaagctgctttattatctcaagtgccatgtggaattctagctttgcctctcagcatgtgg

SEQ ID NO: 74829 - DNA, 280 bp, Oryza sativa
  unsure (1)..(280): unsure at all n locations
cttatgagtgagcgaacttacaattattgcgtagcgctcacttgcccgctttctantctgtaatactgttgtgccagctgccttaatgaatctggcaacgcgaacacctagtggacgtcagggctgtctaccaattctcaggatggacagcctatcatttagatctcggcctctatgcgccttttatatcttattaaggcggagtcaccaggcgatcaaaggcacctatcactgtcgttaaaaaaatacactctcgacttgccactctatcgagtaactg

SEQ ID NO: 74830 - DNA, 372 bp, Oryza sativa
  unsure (1)..(372): unsure at all n locations
agcttgaatgttttggagtcatagccaaaggggcactttggtggcaccacacgaggatcggtgttagcattgccagttntttcattgtcgtcgtcgtcgtcgtcggtgtgattgatggtggttttgttgtctgatgatgattttacggngcatgtggcgccagcggaggcgagtttggcaaatgggcatagagagctcataatggggttggtcgtatctatcgtacgtggattatttacctgcatgaaagaaagattggtggcaagcagttgagtgaaaattcaatgaagcatgagactaaatgcagtacagtagtagaattgaattgagaagaatgagagagatttgtaaagtagggagcagcttgattat

SEQ ID NO: 74831 - DNA, 393 bp, Oryza sativa
actcaagcctgacagcatgtagtcgccgttgaggaaggccgccagctgctccatctcgcgcttgaagtccgacagccatcctccgtcttctttcttggtcgacgacgacgaggaagatggcggcgggatctccggcaatgtctccgggcaatccgtccttggctcgtccaggtccgtgaagaggtgctcgaaggtgcccgcccacgcatccctcctggtgaggaagtcggagctgaggttgaatatcttcttgatggtggccgggatggaggagtgctcgtactcggacgtgggcgttggccctcccggcggccgtcccaccaccgtccctttcctgatccacggcgacaccatgatggtgggcaccctgacgccgaggcggtcgaacctgaa

SEQ ID NO: 74832 - DNA, 391 bp, Oryza sativa
  unsure (1)..(391): unsure at all n locations
agcttattttattgttatgaaagtatagntacgtaaacaccatcgtaaaattatttcatagaataattatatgttctatatgttttggacaacaaactatgtaatttcatattatcattaatatatntttcttacatgtacaccattcataaaattatcaagtttagcataattattgtaaattatttattgtcatggtaatatttatttattacagatcaagataaaacaattcgtgttatacatagacttactgctaaatacgttatcttaacatatattcatgtatgcaaaagaatttaaatttgctaaaagcatcaacgaaaatggtgtttatggttggactcactattttgttcagactaaagatgggacacacaattcaaattac

SEQ ID NO: 74833 - DNA, 466 bp, Oryza sativa
  unsure (1)..(466): unsure at all n locations
tctcacgctatcgaaggatggaactctgaatatgcatgcattgtgtctcgtatgaagagaacttggcctgcctgatgactatatgtgctctatactaccaaaccatcagtctgattgttctctaagatcccctgatactctgacattgatcactatggatgaaaatcttgctgtagctgatgttgaagaatggagagcacaggaatatacagaaaaatggttagctgaatctgagacaaaatatgcttttcctattaactntccaaccggctgtaagatcgagaaaggttttatgggaaagcttgggaattggcagaggctttcctacactaaggcttatgataagaatgaattgcatccaatccgcaatatcgagcggctcgagagacgtattgttggcattcttcatgagctgttaagcttgacaatagaaaagatgataccacttgagaggctgcacacttca

SEQ ID NO: 74834 - DNA, 392 bp, Oryza sativa
agctattatctatatctttccagtccatatcagctccaccgggagaatgatgtactgacattgccggtccacggggagccttaaatgatagcttagacttgggaggttgtaactccgtcggtcgacttggacgaggagtcatcttcacaactatgtcttctttgggccattgtatgaacgtcttgcgcgcatcgcccaaagtcatgatttcatcatttgggggcacgggcagcggatagccggaccaagtgttctttactgtatcgatggacaccttggcatacccagctagcaggtctgcgccgtggaccttgtctgtaacagagggctagaaagccatgccctcagcgacttcatgagcgaaagttgggtggactctcgctagtaggaca

SEQ ID NO: 74835 - DNA, 454 bp, Oryza sativa
agaagtcaaagattgtatcagaagaacagatatgcatgtttatatctgtatagcactacagactagtcaaaggggagacaatagcaaaacatgaacacaaaatcaccgactgtatttatatataaaaagaatatgaagagagaagcagtatctgatctcaacatgtcatatttgcagttcagtactaatttactatatttaaaattatttgatctcaaacatcatatcacctgacccgtaaggtttcatgtgatacacaaacctaagcagcatcgcacgtagaaagtatccccttacttggttatctattcagcgtgactcatgcaaagaagttcctattacatggagaccccctaatgccttcacctcagcaccttcagtagaacaatgaatttcacaatccctcaatacagtaagataagcaagtcctattgtatcacaaagaggatacatc

SEQ ID NO: 74836 - DNA, 392 bp, Oryza sativa
agcttgaggaattccatgaggtagcaaggaaggagcagctaggcgtctggtgcccaaagaatgcaaggaagcatggcatggatgaaaacgagtaccctgtcctggccaaagcaccacctcccccaaagaaaggatatgacctgatcaagttcattgcgtcccggtccgactaagaaaaaaaaaaaagccttgtgtgtttgtgttgaaaatgtcatgcatggagacagaacaatttccttaaatccaatttcgtttttgttggtgcatctcttgtgatgtcaaactttgagatactacctttcaacctttgtaaataaaactcactattggacctaaataacctagctatgtttgttctatggacttctcaattattggtggttcatatatgc

SEQ ID NO: 74837 - DNA, 492 bp, Oryza sativa
  unsure (1)..(492): unsure at all n locations
tattatgggcacatttcattttctacatcaccgttttcattctcttttatcacttggcatattattaactgaatgaattacaaaattattaagtatcactgtcctaaaagctttatgaatagtattgtcggctataaaagtaattcttgtggtgtttcgaggcagttttgtcgatgttatcctatcgnatgatcgacgaaatggacacatacgtgtcgaattgctcctttaatttcctcactgggtccacgtgtcaacatgtaatctgttcctcatttcttgtcggctcgtgttacccttgcggataatagtcttcttttcattgcatccaatatatgcaaacattaattatagcacaggtacacgtacgtacacctgagccctcgttatatagatggaggcaagtgacaagtcatatatgcctcctatgtgctaaaatataaaggttgtttattgatgttcatattatactgtctagatttgtttattaaa

SEQ ID NO: 74838 - DNA, 363 bp, Oryza sativa
  unsure (1)..(363): unsure at all n locations
agctntcattcttgtcaacatggcgatgtctttggtttggtgaccatcaactaatggtatcatccatctgcctcatcacaattagacctatttctttgcacatctcaaaggagaacattagtcccaataaatcggttgtcatcctccacttgatgaccaaccgattgcatatgaaagatatggatatatatgttgagtattcattaacaccacaagcatcatatactcgtatgcaagctcaagtgtaaagatctaatacaaataataggtgaacaacatggatctagaacatgcataataaatgtataggatttgctccccctaaatatatgcatacaaagaaatatacaagagaggcaagtg

SEQ ID NO: 74839 - DNA, 422 bp, Oryza sativa
  unsure (1)..(422): unsure at all n locations
aactaagcttatatatangaattagactgcaatagttctggtctgtattattacacttaaacagcaagcacaaatccttatttagacagccatatcatatgcacatgatatctaccgtcgactgacccacaagcaagcaacctaaacacacaaactaacaaacaaatgctagacagtcgataaactaatggaaaatgagcctaatgctctgaacggctcctgcggtcagtggagtcgaaggcgtcctcctgctaatcaccaggtccctctgagcgactcctataacctggcagataagtctcgccgctgcccggctctgagccactggagctactactgctgagatcgcgactgccactgtgagtagcagacaaccaacctcctgtgccactggctggacccctggctgctgatgctggagc

SEQ ID NO: 74840 - DNA, 386 bp, Oryza sativa
tatcttgcatggagtatgcacaggagttgcagcgctccatcaaacaagaagtctctgctgctctgaaccgctcactatccgttcctgcaggtcagaagttgatctcttcaacctgtttctgctatctcactgtacatatctgacaaagctgagatgataacttgatattcttaacatgcgaagaagggatgttagaggatggatcagagtggaagctagcgaggaaaggaacatgctgcatctgctgtgacaggcaagattgactctgcttctttacatgtactctctcagaaactaacagtagaatgatcaatgatgttattcatgactgacaaattaaatgaacaccttgttgtacttgcatacgatgatcagatgtgggcata

SEQ ID NO: 74841 - DNA, 468 bp, Oryza sativa
ataaaaactcagctttatagaatgaaactcgctcctgtcacttcttattattcttctattctagccttcctgcagtgcaagcatacattggtgcaaatacatgggtagtgagtggaacaccacagacgaagagtatgtcattgcttaagatcttgcgtactgattgttgtgtagcctcatgtttagtggttaacatgaatgaataggtcgaaatatcttctcttgcttgtgttgaattacatccggcaaaaaatcttgagatgaacaaaccctttaaacgcaaatgtgcatctgcgtcgttgaccctatgttattcttcaatcctgcataatggtgttctcatctttggctttctaattttgacagagctgcaagatctgctttcaacaatcatcaaccaggtgggtatgagactttcttcttggttttactgaatatgagttcaatattgcacacctcgccctaatc

SEQ ID NO: 74842 - DNA, 382 bp, Oryza sativa
  unsure (1)..(382): unsure at all n locations
tatcttgtgctccttcccacctgcatctcctactactcctcttcaagggaggcggctagtttgtgctccttcccacctgccaccttcttcatctcctacctcgtcctactcctatcacatcataccacacagcaatggggaggtctccttgctgcgacgagaacggcctcaagaagggcccctggaccacggaggaagatgagaagctcatggagtacatccagaagaacggccatggcagctggagagcgctgcctaagcttgcaggtatgtgtacatgcacaacggatggcgtacgtagctttgatcttgtagctagcatcgatccaaatgcagctatagctcgatggccatggcgttgagttttccttttttntacatg

SEQ ID NO: 74843 - DNA, 478 bp, Oryza sativa
  unsure (1)..(478): unsure at all n locations
ggacaacatggttcagtaaccatctggtagtaactgctcattattatcagatatagaaacacattagtccaaagaggttggaatgatcattctttacctttgatgcctgatgcaagctctgtttccaccagcatctgaggaattttcatccgtcgaacatacagtttatccccccatctgccacatagaagtggctaagcatactattcagtatgggctgcagtttgtagcatccttctttttcgtttcgtttgaaaccatgcagcatgtaacatggatgtctagagactttagggacaaattatgtgatgacctagaagatacaaacggggatgaatttacatcaccattgtgttctcgtgttgtggctcaccattcataagatgttgcgataacagaanatttgtaatggattcatatactggacaagttgtgtgtgagctattctgccctttatacttcttctgacgagcgaatg

SEQ ID NO: 74844 - DNA, 385 bp, Oryza sativa
  unsure (1)..(385): unsure at all n locations
tatctntgattcgctgccggtggatgccgcaagactgcattgtacgccagcaacctctggggatccggcgcgcatcctatgatgctctgatcaccagaacatgtatggcggtcgcagtggcagttaaagaggcctcagctcagctgctgcatcattcattagcaagttctcgaaccatcttctataaacaaatagtattgctaaatgaaatggtctggaagctttttgcttaatctggacaataagtactcgagcaagattgtttttctttttggaaaagaaaacaatattcagaggaaaggatgttcttccgaatattttttatgaagaaaatgcacatgtattgaggtttgaacactgaactttaaggttgacattatatatc

SEQ ID NO: 74845 - DNA, 400 bp, Oryza sativa
  unsure (1)..(400): unsure at all n locations
cttctcccaatgaaaaataagtgtgcaagtatgactctctttattggacgtaaaacatangaattttagaggagtttaatcctataggaaaacttcctatgaagccctttgaaataaaggattgaatcctatcaaatcctttaaaattcctatggaatggacaatcctatagagatcttggaggacatttatcaagagcttcaacctcttggtaaaattcctttgagtccatctctctcatccaattcctgtgtttttcttgcggttcaatcaaacgggcattcctgtgatttntctgcgttntgcaatcctctattntacacttacatttctatcataagcctacgattttcctattcctacagtttctcaatcctgccaatcaaaggggtgaaagaac

SEQ ID NO: 74846 - DNA, 390 bp, Oryza sativa
ttcttacctcagtcaagattagctagagcatggctttaatgttgatgataagttgcccccaaccaatcatcatcaatcaagtataagaaagctttgattttgtacgctaatatctccatcgtcacaagtgagcagtcgtactagccaacttcctgttatactaacaaaaaccaccgccgccgacgagcaccagtctatgtgccgtgctgtgttgaacacgcgactacgcgagtagaaccaagtgagtcgccgtcggcagctgagagtcgtcgatcacaccgtacacctccaatcagttcttcatttatgcaatgatctgatctttgcgaccggataatacaatggattcgagtgatgctttccagaagcacctgtatgatcacctaacaa

SEQ ID NO: 74847 - DNA, 485 bp, Oryza sativa
ggctctcacggggacgacgacgattgcggccggtttattttaatgctaggcggccgccgaggaggtcgatgagaacgacgggcgagagtgggagagtcccgacgagtcgtttgggaaattttggggtgggagcagtgaccatgagctacattggtagccactgtgcgcccaacacagagctcggctccgtggcttatccaaaagtgggcgaagggcgcgttctccgcgagcaaacgcacgaaaggcaatggaggccgatggcgtgagccatgggaatgacctatggctaggcattgtacgtgctctaatgtcacgaaagcgacataaacttggacatgcacagtgacatcgccttgctacatctactacatcgaaaactttcacaaagatgttcttagagagaaaaaggaacatattcagatacaggaccagagaacattattactaacatagaacatgaaccagagctggggcccgataacact

SEQ ID NO: 74848 - DNA, 377 bp, Oryza sativa
agcttgtatgcattaatatttcagtttataagtaaagtggtcaaaatctatacaatttgtcatttttactgtataatacgcattatcaaatgaaacggctggtcatttagtatctaacatgacctttttgtaagatctaacttgacctaatttgatgagtggatattgaaatgaatatatgtgttttttttatttggacagtcacaaggagatccttcgtcttgcacatatattcatataatattcatttatgttccaattcctaacttgtttttgtcctttcttccaaatgggacctagctaggtacaatcagaacgaaacctaataaaaataatttacaacatgcatgtccaagcatttaattaatttcatgagc

SEQ ID NO: 74849 - DNA, 383 bp, Oryza sativa
  unsure (1)..(383): unsure at all n locations
ttcctctaagaccaccactatatcttatattcttatatagaggctctnttgtagagacaattttcataatgcctctaagttttgaagctctatagtttagagacactttcaaaatcgcctaaaatatttttactctagacacactttagagacatttttatcatactttgttaaatttatcttgtagagacatcttttcgcacttaagaacttgcctcatatgtaaaggcatctaaaatgatgtaaagacatttttccaaatattaatatacatcaagtaattagatataagtaacacaaattacatatttacatgcaattatatgaggttgagatggttagggcatcgaagatatagatggtcaactcaagatgtcatggag

SEQ ID NO: 74850 - DNA, 291 bp, Oryza sativa
attcttctcgctgtctccattggatacgcagctgcgaagtgaaaaccgggcacccctccgctgtcgccggacatagtcggagagtcgacgccttcgtggacagtacctctccgcccttcgaaactcgttgccggacatttttcgttggcgttcgtcgtcgcttaagtgggggaaggggcactttgaattcctttgctcccggtgccctccgttggggtattgtgccgtgggtcgcttgcaacagccgctcccatgccgttcccagtggaggttatccctaacgtcttaatt

SEQ ID NO: 74851 - DNA, 418 bp, Oryza sativa
  unsure (1)..(418): unsure at all n locations
tgataagaaacgtggtatctggtttgtatacaattttattgatgaccataaccacccattgacgagccacgacgaaactccatttcttcggtctcataggaaaattaaggacttccaaaaatctgaaatacattcactagaatctattggtattcggaacaatgtcataatgaaggtcatgaagtgcaagtatggaggatacgataaggtgggatttgtcaaaaaggacttgtacaattattcatcaaggtataagaggtctataatcttggaaggtgatgcaagtgcaactttataacttatgaagaaaaggcgggacaaggatcctgcgtttttctatgagtaccaagttgatgatgaaagtcgtctgaaaaatctngtttggtgtgatgctcagtctcgcatggactatcaatcg

SEQ ID NO: 74852 - DNA, 394 bp, Oryza sativa
agcttctattcttatttgtggatccaaataattatgctacctagttgaaattgtatgttcatcgagtgaaaactttcaagctgaaattgtttcgttcgtttttctcctttaagatgtgtattacatgtgcaatttttattaaggtgttacagtacttgtgcttaactgttctgtttattcaacagcagcgttacaacatactccatacaaatgtaataactcgcagcattttttatatcaataatggaaaattttagtattgatgtaaccacactcatgaggcacgccaatgccgcgccccgtaatctagtgcctgtttaccagccaccacaagtagtgatgatacaatgttgaaaaaagaagtctgcaagtattataagttcaatacacatgg

SEQ ID NO: 74853 - DNA, 356 bp, Oryza sativa
  unsure (1)..(356): unsure at all n locations
ctaaatgtacagagattgcaacttaaaatgaaacatactagttattagcaacacgcanattgtaaattagactttaaatgattaacaatcacctaattagttcgaattcctaaagtgttgctagatatgctcaatcaagtctgattgaagttgcttatgagtaatacgatcacgaataatagcatttctttgtatcacttcttccatctctgggttaggtccttgtgagattgtagcttcttatacaggtaatgtgcttggtgtctcattcaaatcaagaggaagctgctcgatgtctttctcatcttcgattaccattgtgtgaagggatatacaagctagcatgatattctcaa

SEQ ID NO: 74854 - DNA, 386 bp, Oryza sativa
agcttccacttactctgtaacaagaccaagatatcctgcaaatgccgtcaataggcatgatataatgtatgcgccagccacaatataaggttccttgataccccacgacttaagaaagtaatacgagggaagaatacgcaagggatatctatttgtcccaaggaagtgcttcttagccatctgaaaagggacctgtgagagataatcgtataaataagacaggctttgttcatcaccaaaaagtaattctatgatcaaatgcgctctacttcaaaggattgtcatatttgaatctgactagaccaagatttaactaaaaactgttcagcaaaaacatatacacaatgcatgatacgattaatgtaccagcgaaacttacttttcag

SEQ ID NO: 74855 - DNA, 424 bp, Oryza sativa
  unsure (1)..(424): unsure at all n locations
ctctctgngatttaatcaaccttcatttnccaaacaccataataaagacaattcaaaagatggcgagcattatcattatcagaaaactcttttccacagatctcaacttcgatacaatntctccaaaacgcttgaaataagaatcaatagactctcctgngtgcatctcanatctttgatattctttatgaaattgattctgacgaaccaattgaatatcattgtttccctggaaattgcacagagcagtccacatgtcatgaacggacttgtggtgttgaacacgattgaattcaccagaagaaattccaccaatgattgcatttcttgcacgataattaaaatcaacctgagccatatttgcaggcgtgatgtcagcatcatcgggcacagtgtaaggtggattaaccttattccacacatt

SEQ ID NO: 74856 - DNA, 281 bp, Oryza sativa
  unsure (1)..(281): unsure at all n locations
tataactctcagctgagntctggattttaagagcagacgttcattttctatttctttgtgtctgcagtctgaattaagtcaacagaacatcactacatcaggcagccactccgataggagatatggttctagattatgaagccatgtggctcaatttgagcatgtcgatcgggcaacaacttgtctgaaattacctgcgtcagtagagcggctcaaatgaatgaccttttatccttcactgagtcagctaaccatatgattttgacttcgagatatgaata

SEQ ID NO: 74857 - DNA, 377 bp, Oryza sativa
  unsure (1)..(377): unsure at all n locations
agctttngtttatacttttcttttttttatcatgatggcctacatttttcacaacagtaattagctttggagatctctactaaatttcacatctcaagtttatttacttcgaaggaattatcgtcttaataatgagcctttttgaacccaacacatacttgtaggttttttttttatgtccaaaatttgcatacggaacctgtacagggtgcttaacaaatataataatgcagtaccccaatctatgttcagaaatatatttcctttgttgttttgctctgattcttggatcacctttcggaagcttctagccatgtctcgtcctttgtcctatcatgtattggtttgcatatatgaagtgttgtaaatgtagctgg

SEQ ID NO: 74858 - DNA, 461 bp, Oryza sativa
  unsure (1)..(461): unsure at all n locations
tcagaagaagttcatgtcctttgccactgatggtgagaatgttgcttgctacataagtgactgtgagaggttgtacaaggcctttttacaggaaattaatgcgtttgtgttgcctcttcttaagagcaagggccgtgggtgatgcaaaccttatggagaatgagagcttcaacgagctgcaagacgaaattcagcgacaaatcttgcaagctcagactgatattgaggaactcataaagaaactggaacagagcagaattgagaggctgtacaaagaggagtgcgaagcgatcagaaaaatgatttctttgcagcctccacgatcggaaacagagaagctcatcgcgggtcttgagaaggagattgctaatttggaggccgagaatacagcatgtataaggactctggaactaaggaagaagcagctntctcttcttcttcatgtnggtgagttattcgtc

SEQ ID NO: 74859 - DNA, 303 bp, Oryza sativa
tttttattcttaccatatcgatcttacagtctgtcatagagatggtgatttgttaacctcaatgacagatttaagtttcaaggcaaaatattccgataaattgtacatgccatacaaaccatgcattatcttagcaacgtcgacaaacaatgacaatatttattgttatccgtgcaatggctatggcggaattcatgtgggatcgtcaactcttcaatgcttatcttattggatgttatacctaacaaagacattcttgacaaaagtgatgactgctcaacattgtattgctcattgaagaca

SEQ ID NO: 74860 - DNA, 386 bp, Oryza sativa
gacacataaaaactcaactctgtgggacggcacatcaatctgatcttgattattctttgtgaggagcgggctcaggcgcgtgcttcacccggtcatgtggtttggcctcaacattatacactgctctgttgaatatggccagatcgccctttgaagcagccaaaagctgaagccccttgaccacgatcactcctgtcgggccatgcatcttgaggttgagatatgtgaggtgggaaatggcttctaacttgtccaaagtcgcactgccgaatatggcattgtatttgtacgggatgtcgacaatgtcgaacaatatttgctcttcgcgtctgttttcgcctgtgccaaaagctaccaacaattgcgcttggcctagaacttggact

SEQ ID NO: 74861 - DNA, 382 bp, Oryza sativa
  unsure (1)..(382): unsure at all n locations
agcttcgctcctaacgctacgtgaacgaacctttntaaggttgtgtttttctcccattttcccaacctacatctctcgttttccgcatgcatgcttttcaaactgctaaacgatgtgatttatataaaaacttttaatatgaaagttgttttaaaaaattatattaatctatttttcaaaaaaatagttaatacttaattaatcatgtaaaaatacgagcttcgttttgcgtgccggggaggagggaaaaaggtaagatacgcctaattgggctattaaaacacgcactcaccccagagagggaaaaaaggtaagatacgccttgaccattattaaatcaatcactgtggagtagaaattttttttaaaaaaaagtggtggg

SEQ ID NO: 74862 - DNA, 493 bp, Oryza sativa
  unsure (1)..(493): unsure at all n locations
gcttggcntaatggccatgagttctacccatcagcagttgtatctaatccaagagtcgaggtccaaggtggtgatatgcgttctttcttcacattggtaccgactggtctaactctatcctgngagttccatagttagctntcagtgcatttcatactctcccccccccccccctattaaccataactcggaatgcttcaggttatgacagacccagatgtgccaggaccaagtgatccatatctaagggaacacctacattggtgaccttcaacacttcttatccaaaatctatacatttgtgtccaattggtgattattgatgtcactataaaattatgtttctgatggagatggcactaatagtctaataccacatatttttcttgttttcatacaaaacatcatatttctaataagaaaaatatttctttcaaaaaacaatatatttctgaacagattatgaccatgggtgtggccaatcattaaattt

SEQ ID NO: 74863 - DNA, 285 bp, Oryza sativa
tacttggctgatattcacaacaatgattcatcaacacatacatatgcctctcttttatgatcatctttttctaaaagcgcatcttcaaatcctgagcttgttaggaaggtgcccaatccttgacttccttcaattggtgtgaaagtcattgcttatgataagaaaaacaatggtggttcatctttcttccgtcgaaagttcgccgctattggtgaatctgagaatctgataactgctttatctgggatgaatttatcatcatccggagcagctaatggacagcaa

SEQ ID NO: 74864 - DNA, 470 bp, Oryza sativa
  unsure (1)..(470): unsure at all n locations
tcagtgctacagtggactaatgtttgctaccaacattcattatgatcacagcaggtcattatcacaagaatcatgtcaatacttacttgcgaggaagtaatcacagtgatgcccatgctagttgctagcttgtacaaatgctcttcaacatcaacgcttgtagcactgcaatgaagtatcttttatgaaccgcactaatttatcagcaaataaagagaagatatgtcaatcaaagtcatggctcagcacatacttcgtgcattcgtcaagaataccaaatttatgatggtggaaaaacaaacgggcctgcaagataacagcagctccaacttcaataaaaagggatttaagcggcaactggtcatcgcaattaacagactgaaacagaagttacactgaccatcccaagcctctgctgttcttccaacgataaaacatctntccagttngaagttgagtcccatccttct

SEQ ID NO: 74865 - DNA, 320 bp, Oryza sativa
ttacttcctatatcttatttacacatgatagactcctagtactcctgccattccttgattcacaagataacttattacctacgtcattgacttatacatactctatatatatctgatctttcccctgtgaccagtctgatagcccaaccatataagtatgtggtacccataatcttcacagtagcccctgagaccttcataggtgacgagataatattctcccgaggtaaggccctgtttggcacacattttcctccccattccaattacttggatccgttatcccttccttacagatctaaatatccctttttgtgatg

SEQ ID NO: 74866 - DNA, 354 bp, Oryza sativa
aactcagcctattaaccttgcccggctataacagagatgtttattctcattttattgatcagtacagccagtctgcatgtagcatctaagatgcatgctctgtggcaccggagagaatgtcacctgttagaaccctaagcccacaaaatagagagctaatgactagaaccacagcttcgtctatcagaacactcagtcctcgatggagagctaataactgaacactcactcttcagaattcacatcatccgtaccaaaattatatgttcagccttagtaaaatctttgtatggaattggatgagaaaacatataaatgtgatgagagctgatgagaaacatgacctagtggcct

SEQ ID NO: 74867 - DNA, 348 bp, Oryza sativa
  unsure (1)..(348): unsure at all n locations
ggcaaccactcgncccgggatcctctaaaccactgcagcaagcatcttactttttgtactctacccacaaattaaattaacccctgcctaagctctgataaaggcaaataacatatttgtgtataagttaacggggttctctctttcacaataatcccttgggagtaacaaaacacgacacctcggaatactttctcgcgagaagccgaaaagctacaatggtaaatccgtgcgcttgcggattacttctggtacacataatataccacgactatttctgcgccattgcttggaatgaatatttctaaaatgtgattaaaaaataccaacagtagggtaacccatgcc

SEQ ID NO: 74868 - DNA, 451 bp, Oryza sativa
  unsure (1)..(451): unsure at all n locations
cggaactaagaaactcagcttgagccgcaagcctcgccttcaccttgcggaggcagttgttgggcaactagccgcgtgaggatgcgcgtcagttcgaccccctctagcctctcctctctctcatctctatacgtatatatgtatgtataaacttataaagtgtgtgtgtgtatatatatatataggcaaagtatatatatgtaaagtatatattcttttatgcatatacctcatttgatgtatacaagatatatacacgtatatacaaaatttatacgtacaattttttttaaaaaaagtcatgtatataaactntgtatatttatgtatacatattagaaaaacaaacaaaatgataaaacgagaaaaactaaaaaataatcagaaagaacaacgaagaaactagagaagactgacacgtgttggcttcaacacaaccccccctcccccc

SEQ ID NO: 74869 - DNA, 368 bp, Oryza sativa
agcttatgcctaacggtactattgaaaagtactagactcggcttgttgctaagggctatactcagaaagaaggcgaagatttcttcgacacttactcacctgtagctagattgaccacaattcgtgtgctactttccctagaagcctcacatggtcttctcgttcatcaaatgaacgttaagacaacttttcttaatggagagctggatgaggagatctatatggatcaacctgatgggtttgtagttgaaggtcaagaaggcaaagtgtgcaaattgttgaagtctttgtatggtctgaaacaatctcctaagcaatggcatgagaaatttgacaaaacattgacatctgcaggctttgcagtcaat

SEQ ID NO: 74870 - DNA, 427 bp, Oryza sativa
  unsure (1)..(427): unsure at all n locations
atcccctatatctggagatgctacatagttacaggacgagataccagaaacctacaaaactgtgcgcacttggcagtgaacgcttcacaaaagattagctttccaccttcttcctctttcttctatcctgttctccgtctctttccttcctccctcgcctccgtgatttcccctagaagcaaacaggagatcagaataacaagagtcaatagcgtggaagcatcatgttgcagccagacggaataactgatcagtaatcacatataatagattgattgcaaatatctctaatcaacaaaagctcatttgaacttagaaatatttgatgcttcatagatccaaagtatagtgggtcaatctgaggctgctatgttgtgcgtcttnttaaaattgtcatgggaaagagattgaatttatgtaaatatat

SEQ ID NO: 74871 - DNA, 380 bp, Oryza sativa
tatcttcgatctcgcctctgtatgatcaggagaccgtggcactcaccggactcttcccgccggtgttcggcggcggcggcgtgcatacgccgaaccttcggcccaccccgcctacccatgtgctctgttgcagcaacggattgtgtctcagttctgaaatcggcagagctggtgctatattttgtggtatttgagcggccttatggcgaatttttcacgtgtttcacccgcagcaggcgaagcatggcggagcatcccttgggccgcaaccgccagcgccgaagccgaatgtgcgaacgctgcgtgggcaagcgaccgacccccacaacatctcggagagggtaatcaaatctagtaccgcaggtacactctcttagctt

SEQ ID NO: 74872 - DNA, 378 bp, Oryza sativa
agcgtcatgtcttctatctctctctcataactcatgcgatgttcgcacagtcaaagcggtttctactgaaagtgttaactgctgactaccacataagaagtcagcaaccgggatttcactatttcaccttcccttcctatgccttgtatctcaagaataagtagcacccaaacttgctctttctttggcatatttttagatactctggcaggagaccaattcctcgtgacccataaataacatggattgcacccattacaacaatgggcattcttgaaatatcaccaacattgagatatctcagaaataatttgggaaatgatataatcatcagccactgtcgcctatgctgataaatatgttgtaggacaaaacgag

SEQ ID NO: 74873 - DNA, 352 bp, Oryza sativa
aaaaccatttaactcccctttaacctggagccatacaatcttctcacattgcttgcaactatgtgcctattggatactaatatgcctaactttggcatgaaaatacagcatgaacaaactttccacactgaatcctggctatgataaaacctcactgaataaaaatgcttttcctttcttcaaacttgatcaagatgaccgaatgactttatctctgaaagacaactgaagccactcttctgtgataataaaaaggagagaactcaatatcttgatttgccaagactctactatttgctcctagattatggtcggctcattgaataagcgaaagcgcatttccaatagtaaa

SEQ ID NO: 74874 - DNA, 387 bp, Oryza sativa
cggcatgggaacaaccatcgtgtgttcaatgaatgtgatgtatctgttcggtgacgacgatggcgaagacatggccgacgatgagagaactgagctcattgaagaggataccaagtttacttctgtgaatctatgcttcagagagccatggttagccctcaatgcaattccttccaggatcttgatagagtgtctaatccatgaccttcgtgataacagtctctcgattgttccatctacgttggaagtgccataccatagctgtgtattgggctcagcatgtagagttagctctccaccagcaccactttggagagtggcaattccattgtacagcgatcatgtctattaaggttatcggtcctccccatggtctgttccatgggt

SEQ ID NO: 74875 - DNA, 385 bp, Oryza sativa
atcttttattcatcccactctatttctctctctgccatgtggggcccagcccgcacagcattgtcacctcctcctccaactccaggaacggctgccacgtcacggacacatgccagctccccatctcgccacctcgccgttcaccgctgtcctgaccttcatcatcccacgtgccacttcacccctggattcacttcatcctcctcgtcgcgttccactgagaaacctagggagaccgcctcgagagctccgggtgcagcatcattttctcctgcaccatcaagattcaccaccatcaccggtgctatctggtgagcttctccgcaagtcaaccacgcgaacgtgatctacagtcactcgatgcctaacacaaccataccctcct

SEQ ID NO: 74876 - DNA, 366 bp, Oryza sativa
tactgaatctcgactactatgcggaagaggatgtccatgcatgatattctccggcgttggaccatgcattgatagtttattctatcacaccaatcattttagttttatggcccacgcgaaaacaataagcgttatatcccgactaggaaacgtctgttgaaagatcatgggcaccgttttttctctgacaaatacattgataaagggaacatgacgagccgccatactaatgttacacagccatccgaggattgcaagaaagacagactgagtactttctcacatgtctcgcattattcaaggcacaaaaacgccccggcgtaaccaatacctcctcggtgacacgaatctttcatcctaatgatg

SEQ ID NO: 74877 - DNA, 494 bp, Oryza sativa
  unsure (1)..(494): unsure at all n locations
ctccagtgataacattctgaattcagtgaggtccctctcatatatnctgtctttatactgtaacagcccagactccaatgtataatgtctctcagggtcaccatatctttcaattaaactcataattttgtgggcaaatatatcctcttgataactcctctagatgtctcgaacccactcttggacaacaactgttatgggtaaacactgctcttctttcaagtttgggctcctggacagcgcatcatccaccagattttgctttccagacttgtattctatcacataatcaaactccattaacttcagtaacaatttgtgttgaatgctctcaaccacatcttgactcatcatgaacttcatactctgctgggctgtcataatgatcaaacattcccctaagatgtagtgcctccacttctttaaagcatccagaattgctatggcatttttctcatatacagactgagccactgctgtgagacctaatgcct

SEQ ID NO: 74878 - DNA, 388 bp, Oryza sativa
  unsure (1)..(388): unsure at all n locations
tatctcttatttgtgctcaattaggattggttactctggattccgttgcttaatttgtccactgcaaatgcaacttcacgaccagcttaccgatcgccggacactggtggatccagtgtgactgattccgcttatcctcccattcgccagccggcactgctttggggaactctagctctcattatgcacctgttgtgatcaatcatgccaccgaactgaagccgaccatcccactgcctttgatcgattgcctgtgtatcangtagtgctacagctacttttgtttctgtacttgctacaaaataaggtgatgtcaatttatggatttatgacctgctctcccctttttttcacatttcttgactgtgagagaaataattatagaaat

SEQ ID NO: 74879 - DNA, 493 bp, Oryza sativa
ctcagcttggatgtgaacaaccatcgagtgttcaatgaaggtgatatatatctttggtgatgatgatggcaaagacatggccaacgatgagagaactgagctcattgaagtggataccaagtttacttctgtgaatttatgcttcagagatccatggttagccctcaatgcaattccttccaggatcttgattgggtgtctaagccatgaccttggtgttaacagtctctcgttggttccatctacgttggaagtgccataccattgctttgtattgggctcagtatgtagagttagctctccaccagtaccactttgtagagtggcagttccattgtacagcgatcatgtctattcaggttcttcggcctcgccatggcctgaccatggttgattcaagcagcggatgtgtgggtgatttcagcctctctaccatggtcaccactctacaagccagaagcaaggtctattgtgagcggaactatactgtgca

SEQ ID NO: 74880 - DNA, 378 bp, Oryza sativa
  unsure (1)..(378): unsure at all n locations
ttctctatctttcttcgncgccgagtggactgagtgccaacataacctcctgcaataaagatggagtattggactatgcattttgacgggtcaaaaaggctttcacgcactggatcaggagatgttctaatttccccgactggagagaggctgagctacgtattgtggatacatctttctgtgtctcacaacgtggcagaatacgaagcgcttcttcacagactatagattgcaatctctttggggattcagcgtttgatagttctgggagattctcagttggtggtaatcaagtttgaaagaatggtcctgccttgatgataacatgaccgcttaccgacaggatgtacgcacgttgtaagacatattcgatggact

SEQ ID NO: 74881 - DNA, 386 bp, Oryza sativa
agcttctatgcattccactctatttctctctctgccatgtggggcccagcccgcacagcattgtcacctccttctccaacttcatgaacggctgccacgtcgcggacacatgccagcttcccatctcgccacctcgccgtgcaccgctgtcctgacctccatcatcccacgtgccactatacccctggattcacttcatcctcctcgtcgcgttccactgagaaacctatggagaccgcctcgagagctccgggtgcagcatcatcttctccggcaccatcaagattcaccaccatcaccggtgctatcgggtgagcttcgccgcaagtcaaccacgcgaacgggatctacagtcactcgatgcctaacacaaccatacccttctt

SEQ ID NO: 74882 - DNA, 345 bp, Oryza sativa
  unsure (1)..(345): unsure at all n locations
gctaaaacaaaatgtgtacgatttacaacaaaaggagacggctgttgcctaatgcacgcactgcccgtacagatttatctaaactaccaatagcacagcatcttcttgcagcgccaacactgctacaggatttttatagtcggcgccccgaactctcatcanggatggagctcacgtgcatgcaaagggcacgcagcccatgctggctgtcgaaattctgaactgatccaacgcatggccaatttggccatggatcgaatggatgcttggctgcctgctcgctcctggagttctgacctgtaatagtattttcttaattctttcttttctcccaaatttagtatc

SEQ ID NO: 74883 - DNA, 447 bp, Oryza sativa
gcttgccggtcgccttgtgaacgaccaccgggttctctcacctctccggatggatgacttcacggatgaatccggcctccagaagtctcaccacctcttcgcggatgaaggcttgacgttcctgggcctgccgccgcactttctgccggaccggtcttgcgcccggccgcacggtgagacggtgctcaatcaccttcctggggaccccgggcatgtccgctggtcttcatgcgaaaacagtcagcgttgcccgcatgaaggagacgagcgcgtcttcctatttgccatccagaagactaccgatccgtgtggtcttggatgggcccgtcgccaaggcaacctccttgaccgggacctcgtcgcatgtggcactccgctgccctcgggcggtgggggcggaggtgccaagcctctcgtcaccaccctcgggctttgtcgcagcagcga

SEQ ID NO: 74884 - DNA, 376 bp, Oryza sativa
  unsure (1)..(376): unsure at all n locations
tatctttctagttattgctactgcactattcctccgttagatgcgcctaacttgttgtttcttgttcagtccgccgccacctccaccccaccatgggcttcctccgcactcttccaaccccgctatttctccacaagagctaccagggtaaaattactgctctaattgccttgcctatctgctacctttgtccccaaatccaaatatgagggagtttggctctgcattcgcattgccaaaatcccttgtatttcttttcggggacggatgaaatcgattctgcatttgcatccacgattcctaactggatgagagaggagtgacctggagaagctacctgtgatgctggaagttntaccccctcgttgagacttga

SEQ ID NO: 74885 - DNA, 488 bp, Oryza sativa
tgtgcacaaaataagcaagcacacgcgatctcttaatgatccaatccaattacttagaatcaactcaactcaatagtgcagtagtagcaaatcagaaaacaacttcaactcggactggcagctgctgacgcatgacgaggcgcgcggccacgtccgcgagtacgccgacaacgccgccctctgggaccacgacttcgccgcctcgctgctcaagctcagcaagctgcccatgccggtggggagcaaggtggagatcaggaacaagtgcggcgccatcaaccacagcaagagctaattcggccacttatgcagggggttacgtacatgcatgcagacgatgtggtcgtagccatatgtgttcttgttatatctcatcgttctaaaatacagaaaaccttgtactcgaaaaagacatcatatagtactatcaaatcagtctagatgtatactactagatagctagtgtctaatcgagtactaggagtata

SEQ ID NO: 74886 - DNA, 395 bp, Oryza sativa
  unsure (1)..(395): unsure at all n locations
agcattgctgtcttattcttatctaagntcagaggcgcaagcacatcatcaatcactgctctggctaggaacagtcccagctcatctgaggcatccaatatatcaagtgcggtatcttctgcagattcaagaagcattatgaaacccttgacaatgtcttctgttgagaacaattccatgcttaatgaggatagaagaattgaagccatctctttctccctgtttatgcggcccatagcaattgttataagcttcttaataaagacggggttgtactctggagaaccaagctctctgaggctgcgaataatctcatgtacatcatcagagagaaagtactcatgaatcatagaaacagcctctttcttggacctcctcagcttctcatgttcatc

SEQ ID NO: 74887 - DNA, 503 bp, Oryza sativa
tcacccttcaatgtccatatagtctgaatcacgctgcaaatctattccaaattcaagaaatctacgaatgccagttaaattgccagcttctacgtggactgagataaataaacacattaaagtgtacaatgaacttaactataatgaaggtggatgagaaggtcagaactgcacattccactactatgtagcagtgcattctcatgcataaacacatatattgatgaacaaagtctatatgctaaaagtctaaacacaacacatgatacaccaaaccgtataatcaaatgtgcttaatagaacggcataaatataattcaatagattgacattatacgtaaccaatgtcataatggaccaacgagaagctaatattggaacatgtcattctttgtgaataatataacaaaacagctaacatcttcatgtataatctatgttcttataacatagatacacatgcatgaattatgcatggccgtctgtatctacattgatataag

SEQ ID NO: 74888 - DNA, 310 bp, Oryza sativa
cagtatgcatgcagcgtgcgttccgcagttcatcatctctgcatgctatgccgaaaaggacccctgatctaacgtgtatatattcatgtagcagtagaagtctaacaacaaaccagcatggtgaaaataaacctgctgttagctatattaagcatacggattgcatctggtgcttgtgaaaaagcacaggtataaagtgcatgggacctgggagctagggagggggagttcatgagcaatataaactgccacggcgggggtgggggcaatgaaacctgttgcatgaaggcgtacacgaggttgatattct

SEQ ID NO: 74889 - DNA, 442 bp, Oryza sativa
atgggcttgtgctggtccaaatacttctggagcaggcagttcaaccacataggcttcaggaatcccatctgaatttcatgatcatctgttaaataggaggaaattgctttgggtcatccaagaacaagcatctgatcttgctaacatctgcacatctgtattggagtttgaaggatcgagagacggaatttaccttattcctgaggataaatctctcggacaatctacttgcagaggcaagacatggcagcaaactttcttgaatctcctgacacgtctagatgcagcatatcgttctttcacatgtaagtgactaccttttcgcacttctattgtatgtatgtgtagacaatgaccaccaaactgttcttgggtcaaactgtccaagatacttggcccatgagattcaagatatacaggctcaatgaatcacctactgctt

SEQ ID NO: 74890 - DNA, 330 bp, Oryza sativa
caacttcctttgacgttatctccgtagggatccgacatccctgcccgagatgaagagggcacccgatcatgccattggagcgccggaacgctttatatgccgaagggcggcttctgctgtcccacgtaccatcggtctttttgccacagactttcctctactactgtcaccgccattatctgtgcacaccttcaccgccggtagccaccccgctatcaccttcactgacgcttgccagtctcttcctgttcggatccaagcatgcatgctcggatcaataacagcgaggcgactctacaccttcaaagcgcgtttcggttcctagccgtg

SEQ ID NO: 74891 - DNA, 294 bp, Oryza sativa
actcctagatgaaaataaactttttttctttacccaacaagccagggcaagactgctccgggccacccagtcaaaaagtaacaaacaaagtatgtcagtaaagactaggcaccctactaattgggggctacacggtgatatcagacatggggccattagaggtcgcacgtaatcaaaggtgcgaagtccgaaacaccctatatgtactctgaggcccgtaactctataaaaacaacttggatcgtgcccagctatgatagtcaagttgagattcaattacatacagataactag

SEQ ID NO: 74892 - DNA, 393 bp, Oryza sativa
agcttgttttccttcctatccaaattgggagcatcccggttaaactgttgccagccaaatgaacttccttcaatttgctgggtgaacactgtggcaaactctgaaatatatccataatatttccatattctagcctacaatcgaggtctagaacttccaaattgcatagattcttcaagtttgctttcatggtgcccatcttgccatttttcgacacgctcatgcccatgctatccttatgatcatcaaatgagaaatcaagaacttggagggacagcatgcttcctagcgcttgcggaatatcaccgtacaaactagtcgagctaagattgagatgcttgagagatgtcatgttccaaatccaactagactcagctgggtgggtaaaatcat

SEQ ID NO: 74893 - DNA, 405 bp, Oryza sativa
gcatgtctgatgtctcataagcactaccgcaagtgaggagaaataattaagcgatgagccgatgattgaatgatggaatcgaacagatactatggtcttctacatacctgtggcctagctagctaggcaataatgggatcgatgtcaccggcgaaagttgctgcgccgacgacgtatggccaccacccaccagatcctatcaatatagagctcgctccccgatctaatatatatgtcgcgtttcctaagtcttccctacaatgttgctagttgatactccagaaatgcagaaatcgtctcatccacctaaatctactcggagtttggttggtcagctaatgtgataatatatactccctccgtcgattgattggatatgttcgctactctcacgtatcctctcgc

SEQ ID NO: 74894 - DNA, 387 bp, Oryza sativa
ttttcttatttttcttaatgcgccggaacaagaaccatcctctagtaggtctaagcctcctcccgttcgtatgctatctgatgaaggcttatgatgttaatagtctaggggagtatatagatagttagtccacatagaagtcttcccttgagtatcacgatgaaatgcatgctgcaccctgcattgatggttattatatggagccaaacaattgaacgtagaattaccctcttactaactctaccttgtaaattaagtttctgtatcttagacggtgtatgattaaatggttccatgtccacattaacattggcatccctagtgataaataccaagcgcataaggcagctcattatggagactgatgatggcaaatgaaaaagattg

SEQ ID NO: 74895 - DNA, 320 bp, Oryza sativa
aggacgcttatgggaaacatatccatgaatgatcatatgttggctaattctttaactcagtgaaattttcacgtatagctaaacaacgccattaatatctaagggaaagaatatctctacctcatgatacgtctcagactcccctagctatgtgacataatcgacaatgacacatattcaaagacgacttacttccatcattatagaataattattctcctcattctcgtttaagcttaagtcactaatgacacaacggaatgtaaaacatcatcaatgtttgattaatgccacagatggatactctgtgctagacccta

SEQ ID NO: 74896 - DNA, 362 bp, Oryza sativa
agcttatatatatgtgaagccttaaaacactttgctattggcagtaaaattggacgcattacaaatgacccatccacatctaaaaaaccattgcattacctttaacaacccatcaaaagctttatgtgtcaagaagatggccaagttagagcgagcatattttacagcatcctccagttgtccagcctaatgcaagagaaactgagattatatcattatgaaacaggatatagtgtaataatgcaacatgtccaagtgcccattaccaccagtgagcatgcaaacaaaagccctatgtggggaacatcaaacagaaccacatgccaatttgaccagatgtcaaaataaattgaactcacata

SEQ ID NO: 74897 - DNA, 350 bp, Oryza sativa
tcatcaataaaataataatacagatgattcactattactatttgattgatcctaaatccatcgaacaacagaacctctagtaaataaccgtcctatgtaatagatgcatgctagccatatccttcatagcacttgatagacacaccatgtagccaatatatatgatcccaaaatgctatgacgtaactcctgaaaggccacgatgacgatagaaagattaagagactttagccttagcatgagtgggatccattagcaaacacgaatagtacactttgttgcgcatatttgattgttggctgaatatagagttttctcgcgtattatagaccctgtgtatccggtagtcg

SEQ ID NO: 74898 - DNA, 496 bp, Oryza sativa
  unsure (1)..(496): unsure at all n locations
tacgtgaccttagatactcagcttggctanggatcctagtccgatccacctcctgttttcttggtcctnctcttatactctaaggggatactacatgtgctgcgagtgctacctatggagaagggaaaatattctctatattaattacatgtcttgtgccttagcccagaagctatctgcacgtcggttgctgcgcggggcccatcaaatcatgcagggcgcccttgtcattcgccatttaatggatgaggacttcggggttctcgttcacaccagaaaacgggaacctgtgttagtttagaggggttggaccagctctgaccggtgtaagaggctgtgaagcccctcatcattatgatgggacgggacggagcacgccgctcgtcgtctgacacactgatatggcggtggtatatagtcgccgtcccatcggtcattcaaccggtcacagaccggtcagatgcgcagcacgccgcattatatgtggcatggcacg

SEQ ID NO: 74899 - DNA, 290 bp, Oryza sativa
tgcttctcttgtggaagctgagctacaaaaggggggacaactaacagaacatcagacatcgatgcatacagacacacaggaaagaaacccgatgacatccgaggggataacgagtttaaggacccatatatctcctatccaactaagcccgatgagcaaatatttagaagtttctccctttccatacccagtggcacaacaaatgcattgggcgggcagagtgggagtggtaaatcaacggttatcaacctaatcgaaaggctctacgaccctcagctctgggatgttct

SEQ ID NO: 74900 - DNA, 422 bp, Oryza sativa
  unsure (1)..(422): unsure at all n locations
tcacttttgaccatgctgatgatttttcttaacctgaacaacttaaatggttgagggcgacgagacnttctggtcactcaaaaaacaggaaatgcaaccttgttcccacaatatagaacaaaaaaatcctccataagaacctactatagatatatattctctgcttggcattggattaacttgtggacaaatatgcaggacataagtcaaagaaagctgttgtcggcggtactaccactataacagctgctctaatgtaaagatctgtattatatgagctagaagtgataaaaccgacacctatatatccttgtccgtctccactgacttacaaagagatatctttaaacaattatcgccggtgtgtttttataaagcccgaacacatgtgccctcttctaatacgcgacacccacaatata

SEQ ID NO: 74901 - DNA, 386 bp, Oryza sativa
  unsure (1)..(386): unsure at all n locations
agcttcatggcatcctcgcccacgctcactgtcataaaggttccccataaccggatcgaccggtagcggtacataccataaagcaggctcctgtgggtctcctcctcctggatgtgccaatttggcaacaatcatccctctcaagtagttcacccacatcaagtagcgacagcggtatgataacactgcatcagttgaccaccacccggcaccattgatatggtcaatccgcacatccctgaagactcttcagccgtcggagccggagaaaaacatgtagatgttagctgcagaaggatggtatgaccttctctccatctcggccacaacgaacgaatacttgctgcatgacatgacacccatggccacnctactcatgatgcgtg

SEQ ID NO: 74902 - DNA, 488 bp, Oryza sativa
  unsure (1)..(488): unsure at all n locations
ctatgcacagtacagtagtaggttaatatatgattgaattctaatgatcttaaatatgagcaattgtttacctgatcattactgttcggatcttcataagctcttttgcctgacaaactgctngtctctaaattacatggctcagcttccatgctctgaatatcttgtggaggatctcactaaattaagtgtgtcaattcttcactatagtggcagaacagagaaatttaaccaccagataatcacaggaataaatattcgaggaattaaattaagttaaccaactgatagtctgaaacttcttatgcatgggtagtctcctagtcaatacaagccccanagctggagctaagcaaagacttaacatataaaantcagatgttataattaatcattggcgaaattgtcaacaaaaacagaaaacctcatgatattggaacttggtagagtaggacgagtangaggagccctcacanactatattctac

SEQ ID NO: 74903 - DNA, 344 bp, Oryza sativa
tgcttgctgcattcttggattaaaatatttacagcacaaacattataacccacaaacatggtttcaagatctgtccaataccaatagctagagaatatgggcactgggcaaatggacggcacacaaatattgcaactagaataaatctgtcgattttatgagaagtaagatgtcaatggtcactggatagttctgtgtgtgtctgtgtgagagatatatagagagtgcgtgtgtgtgagagtgtgtgtcgttttgccatatttcatctagagatcacaagatgaagaaggaggaagctccctcaagtgtcctaacttgaaagctaagctggttacctctactta

SEQ ID NO: 74904 - DNA, 428 bp, Oryza sativa
  unsure (1)..(428): unsure at all n locations
tgtgcatncaatgtgctgccgtataagacgggtaagctatatctgaccgcaacggtgaagtggtggtggaatagtggtgcgtacatattatggacgcgaggacgaagatccagcgacaacgaactatggtggccatagatgatggaatatgggagcaataatgactagtaagaatgtggattattatatttatacgttatataattatttagctaattaatgtgctaacagcacaatttggatacgtggaataaatcacggaagattgaggcaaataaacaagtgaaataaaatcttctacggctcactatagtgcctatggagcatgatccatcttctaagataactacacagctctcttgatgcactttagagagggcccacgatgtatacatatttttactcctcggttaaaaactcatctaaat

SEQ ID NO: 74905 - DNA, 483 bp, Oryza sativa
  unsure (1)..(483): unsure at all n locations
tggctcgtcctaagctcgattcgagctcgactctatctctttacgagccgaactcgagcttgataaaagctcgcgagctgtaccgaaccgatggtgagcttctaccgagcctaaccgagcttggctgtgtacagtctatattgcatgtccaccttattaatataataaactaatagataaatatatatattggtatctatttacacaataaatnagcatgtgttagcacaatatatttattttaatcattttctactctcttattagtgtgattaactagaaaataattagacttatcaagagattatgattaaaatatatattatactacttatggccgagctcggcaccgagctcgagcttgagctcgagctcgaacgagctcgaaccgaacttgcctataagctcgaaagtgcaataggctcggctcgagcttgtgtcgagctcgagcttatgcagacgagctctctcgagctaagctcg

SEQ ID NO: 74906 - DNA, 389 bp, Oryza sativa
agctttgatctttacgttaaatttagattgaattgtcatgaaaaaaaatgattgataacttaattttaaaatatcaaccgattgaaaaatagaagagcctaatatatatccatccatacgactattatgactgtactgaatttgtaatcactttaatggaatgttttataaagttttattttttcgcgaggggaatgtatattaattacggtaaccaatttaagcatggtcgaacctaaaccttggcgacgatgaaaataacatattaattgtaggtagaaaaatataattaaatacgtggtgaaaattaacgtgctttattgccttcatatgtgcacgttcctgcatatacatgcatggtttatggggatactgctgcaggatatata

SEQ ID NO: 74907 - DNA, 495 bp, Oryza sativa
  unsure (1)..(495): unsure at all n locations
tatagaagaatgagagggatcacagtgagacatcactgatgtctgtatataactaccagcatctcaaagcggagaacgatacgcatagatacaagagccagatacgtgctctcgagcagcatatttcgcagctgaaggtattcttggactcgatgagggttggtgccccatccaagtggggagcagacaacagaaccaacgcgttgcggcctttctgaagggataaagaatggcagcgctcatattttggccaatatagcagctggtccccatgatttcgatgttgacgacatacagcgtgaccgggagtgcgtcatgtgcctgagcgatgagatgtcggtcgtcttcctaccttgcgcgcaccaggtggtttgcgcgaaatgcaatgacctccatgacaagcaatggatgaaagagtgcccatcgtgccagacccccatccagngcatggagtgcgtccgtctcgcccgttgctagacatcttcatatacacca

SEQ ID NO: 74908 - DNA, 284 bp, Oryza sativa
ggggttggagtacaacggaattgctatataggcgccgtactatcaataagaggttatgaagcgagcttgtggatgatcttgtgccataatacgtcatatgcatttaagtgcatttgtggacctgtctaacccagtgtgatgaattttctcaagtccttaacccatagagaaacgggcatgtccaaatagagtgagtgacatcttgtgggatgttcggtggatataccttggaatgtaagccctctatcctcgacttaactagtgtatcttggatgggttttcat

SEQ ID NO: 74909 - DNA, 404 bp, Oryza sativa
  unsure (1)..(404): unsure at all n locations
gaccttaaatctcagcttcaatgtcattctctccgcgttgagtccggatgagttctacatggtttatggactcgatgaggccaatgagatatgggatancttgcaattagctcatgatggatcacccgccgttcgtgaggccaagatagtattattggaaagaatggttggaagatttgtgatggatgacaaggagacaccacctgagatgttttataggatgatgatccttgtcacaagattaaaggacttgngagtgaggacatgacaaatcactttgttgtcaagagacttctccgtgcatttggtccaagaaattcctctcttgtatcaatgatactagaaaggataaacttctagaggctcactccaagtgacattcttggaagatttgtgtctcatga

SEQ ID NO: 74910 - DNA, 394 bp, Oryza sativa
  unsure (1)..(394): unsure at all n locations
agctttaatgtgatctattgatttcaattgggaatctttcttctcatttgagctatcttatcatagcgaacaaccatatataaggaaaaatacctgaatgaatagggaacttgatcaacataaaatcgctctatatggatattaacccgttatagggaattattccagcttctcttggcanactcaagaagcttggatacatatatataccatataataacctgtctggaaccattccaacaactcttgagaatcttacaggactaaatctactacaactcctaggaaatgctactcatgggtgcattccttccaatcttagcagttgtcctctagaacgattggatcattcatataacagcctcactggcttgatacctatacaacatatttc

SEQ ID NO: 74911 - DNA, 412 bp, Oryza sativa
  unsure (1)..(412): unsure at all n locations
tctcaatatgctagagtttgatgatcttatgcttactagcttgtgaaaaagaaattaattgcttgcatgtaaaccttgcggcttttctctgctctgccattgtaatagtagacttatgactaatttaatttctagagttatgtttccctgattatcgagacaaatatcttgtgtgatggataagcgtctatatttggtggcatcttattgactttgtaaaaatagtagattgcttgtccctaacgatttattattgttcgacgttgatgcttcatttattatccataaatttaaatgttggagctttagatggattccgttattttcaaacgttcttcttgtatggattggttaaatatagtttttggattannaatatgataagctgactattagtaataatctaaataaa

SEQ ID NO: 74912 - DNA, 390 bp, Oryza sativa
tggacccgggagtcttatgtcgaccgcagcatgctattttttttttcttcaggcccggagtaaaaatacaacacatccaaatagtgacgagtcaactcttgtggcgtaatgccaaaaggaacacatgatgcggctcaatacatacccggtgtgcgctcttgtcttgttacttttggacccttctgagtttttgctccttcaaaatggcaacaagacgggccttcacatgcaaattcaatttatgtaattcaatggaacatattgtactgtaatgatgataaatatggtagaccagctctacgacttactccatcatataaaaatggcacacttctttcatcctcccacgcaaatgttttagctatcaagttgtcaatcaatgctgcacaa

SEQ ID NO: 74913 - DNA, 383 bp, Oryza sativa
  unsure (1)..(383): unsure at all n locations
tggatcatagtgaagaatgcgagcaagtgccaccctcatctatcatattangctcgcccaagaattcaccaaagtattcagagagatcatcccaccgacaacatcttatgagacatcaacaagggagtatccactcgctcttgtattgcaaatttttgtgagcattactcgtatgtgtcttctggtgaacctctaagggtggaataagctcttaatgatccggattgggtgatggcgatgcaagaggagttgaacaatttcacccagaatgaagtgtggactctggtggagcgacctctgcaaaatgtgattggcacaaagtggatcttacgcaacaagcaatacgaggccggggtcgtaataaggaacaaagcgaggttagt

SEQ ID NO: 74914 - DNA, 386 bp, Oryza sativa
agcttcatctacaggagataactcgactgcaccgcatttaaaatagcatgttaaataaaaaataattcaacatgttaaatgaaaaccaaaggtagaatatagttcgaaaccaacaaaaaaaatattcctttcaagccttagaacacacctgaggaaacatgatacccattcatccttaacaggcgaaaagccattgcacatgttgttatgtccagcataatttcctcatctctttctaaccatgaactgcaaactagctaaaattaagtttgaactattaaagatagataaaatacttactcaaagtcattacacgtatgttgtgtctaggatgctctttatctcactgacaaaatactgagaaattcccatcttttcaagtgcat

SEQ ID NO: 74915 - DNA, 386 bp, Oryza sativa
ttttcagtatatatagactcaacacactgctgcaatctatcctctcctgaactagaccctgcagcggttgtatcaagtgtctcattgcatgattcccccctatgaatagaatggttaacaggcttctttcgtgccaatgtgtgttggactgctgctgacgaagtcgttctgaaagaactgaatgtctactttcttggaactgaacgaatggagcattgtgctggtatctgctctgaacgaattggaaggtgtctctctatttgtgactgctgcaccaaaataaattaatatatccaaagattagatccatacatagtagaggaagataagaacattgaaagggagctcgcgatcgatatgatttgcctaaaatcaatgagtacatc

SEQ ID NO: 74916 - DNA, 386 bp, Oryza sativa
ttactctaatgaattttgagagcatatcatggtgagggagtgaacatgagctgaaatgggggtggatttccttctccccgacggttggcttaaatagaatgcccacaacagtcataaccgacctgtgggacccactatccgttgtctcaaataaagatgcacgcaaccgttggccttgctggaggccaaacccttggtgggcccaaccaaccccactcctgccgttgatttcaacggtcagtgccgtcatggctcaccgaattctcgttgaacactttattttggcttgcttctggaaaaatcatttgaagtcactctctcaaaattcaattctaaatgcaaatctcggaattcacatatgcattgatgcaaatatgccaattgat

SEQ ID NO: 74917 - DNA, 456 bp, Oryza sativa
gttggaagtgtgtgaataaatgaatgagtgaagatttttatatatgtagttaatgacggttggggaaagggaatatgtgaaagtgcattccaagcgggattaggaataaataaggagtattatttttaaagagcaggataaagggaggagataagggatgtggggtggttaatatggacgttatatttggagtgtggactcctattgttctggattatgtattaatgggagtattgggatgattctatggtattttagtgaagagtaaagctggttaattgtatggatatgttaattattcagtgtagtatgattttggtgtaaagttttgtggtttaggatatgcagtaattaaacaagaacagttgtggaatatgttagaatgtagacgtatcaatatattggatagttattatctgagtttatgaaatgctggggaataatatgtgttttata

SEQ ID NO: 74918 - DNA, 481 bp, Oryza sativa
cttggctccaataaagaccacaagataggccgatagctccttatctctctgtaaaggccacaagcgtgaacgcggcaaggggaaagtcggtgagttggcgccggagccaaataggggcaaggcttgtacgtcgatgccggtgagcaaatcggggaaggtcgtgagggcgccagcccgatttgagctaagcatgccattggtggaggacaatgtgttagctgtgatgggtattgcttgccgagagctacataagcaatacatggagctaagcaatgctaagcggaatatgatggagtcatccatagttggacatcacgaccaccagccgttcctatcgtcgcctgcctatataactatatgctttgatgacctcttcgaccttttcaggatccggatgttggacactggtcttctaaaatgctactccttgtaagtgcatatcttctatacttgtgatatgactggactatatctcctaatt

SEQ ID NO: 74919 - DNA, 386 bp, Oryza sativa
  unsure (1)..(386): unsure at all n locations
agcttatccatttggagatgtgtggtcagcgatgctatggtggattgacaagtgttcctcaaccatttggccataactgaaaaagaaatatcattctgttcaaactcagtagattntagtgacaccatgtccataacactgcagttttctctaatttgtctcgcccgtagtcacattgtgcattttgatttccaattcatgatttgttatctcctttcaataaattataaaaggcagcatatgccacaggattgcttgctcactgctgctagcctgctactacaattttacacagtatattttcttagtcggaaattttatgtaccaaaatttcagtaatttcaaccctccaaaagaacagttccactcaaatattttggtatatt

SEQ ID NO: 74920 - DNA, 488 bp, Oryza sativa
  unsure (1)..(488): unsure at all n locations
tgtgtcngnttgactctcgatattntctttattttaacctatttgagtgtaagtgaaaaataaatcaaccgagtgacagatagacagtcaaaaagattcaggagattaaatttttggtagttcgttgaggatgctctaataacaataataataaaacctcgtgtagtaagaacaatagtccccatttactgcatgaaattttntaaggtaaaatataactctcacatgttcactggcgctgcaactgctcaaacatttcctgcagagattacagctcaagatgtgtctcattgctctctgtgtttctccgctatgccgccacgtcttccacaatggaaaggcccatatatagctgtgttcggcactgctcccaaccgaagcggcctatattagcgtgtaattaattaagtattaactatnttttataaaataattaatttaaactttttaagccactttcatatagaaacttcttttgaaaactcact

SEQ ID NO: 74921 - DNA, 358 bp, Oryza sativa
tatatgtgctcggggcagatccgagtttagcataggtgtgcacttgagatgtgataataaaggcaatgtaatcgttcttattcatgacattatttggtgagcaaaaattcaagccattgggacaccaagagcctctgcaattgcaggagatggggttgaggacatattagacactagtggcgagtgtttactctatagtggaataggatactggatcatttccttgaccttgaagaagtggcagatatttgacatgatctatctgatcatgtggaatcagctgcaacgacatgaggccttgaaagggctggggtatcattattggcagatatactgcaccatgatgtcatgagcctga

SEQ ID NO: 74922 - DNA, 337 bp, Oryza sativa
acttcacgtactatgttgcaaatggacagatcgatgatcatcgttcctagactccgatcatgaaagtttcaagatgatcgatatctgggtcccaattagagaccatggtacatctttagcttttgttttgaattgaatcaatgaaattaatatgtatgaattgcgaataaaaccttaacaacttctcatatacatgataagtccacacaccactgtatatatatatatgcgtcaagtttactccttcgacaccatgttacatgaactgttgataatcttactcccatgccagataatacacatgtggacattaagtactcatatctctacgcgtcta

SEQ ID NO: 74923 - DNA, 406 bp, Oryza sativa
ctggccaagctttgtatatgtgctgcagcacaattatcttcttagagtctagggaataagaggactacgtggtgtttgtatccacggactcaactttagtctctgtatttagacactaatttagagcattaaatatagactacttacaagactaattatataatatgaaaggtggatttgcgagacaaaatttttaagcctaattaatccatgattagcctagcatcacataggctaatcatggattaattatactcaataattcgtctcgcgaattagtccaagattatggacgggttttattaatagtctacgtttaatatttataattagtgtccacacattcgatgtgacagggacttaaaagttatatccccatttaaaccgagtcttagtggcaagttag

SEQ ID NO: 74924 - DNA, 388 bp, Oryza sativa
  unsure (1)..(388): unsure at all n locations
agcttccagtctcttttggtttaagcccaaactgttccctcattacgtcagcaatcacatcggcccacggtcgtttctgaactgctccctgcgactgttgntgcatgggctcgaactaaccgtattgagatgcaaactgaggttgagccagtccccctggctgatattgggcttgcggcgaaggagcctgatattgataattcaagttgcccccttggtaattatgaaggttcggctggatattacgtactaagtgttaaggaacaacttgaggcattactgtgccatccggctgtacgtggtgaacaagtgttctgggacaacttgatttaaaaattgttgacaggctgaccactaggcgttgcaaacccgggcgatgcgctcattg

SEQ ID NO: 74925 - DNA, 360 bp, Oryza sativa
ttctgcagtactcaaacagttaatacattgccccacgatgactcactaaccatgcatgcactcagcaaataactgatagggcccacatgtcatccacataaaggaagcttcctgtagtaatcagttagttaacccattgtctcacgattagttgatctgcatgctccattcaaatgttctcaaatgctaaaggcgcgcgcggctgcttgaaaatggcaaggatcctcctctataaatagatggagtggggccagcacggagaagaagagttcgctggggggagtggtgtgagggctggccaacgctagaggctactgcactgcatcgctgctagttcgctactgcaaaacaattggcacc

SEQ ID NO: 74926 - DNA, 360 bp, Oryza sativa
agcttgattctaccctatccgcatcgaccttcgtgataaaacatgaaaaagctattatttccactgatccaaaaataacctagtctcacatttgccacaacctttttctggaaaaattgatggatcatgtccttcataggataaatcaagagcaaatataaccagggatgtgctccaacttacttgcgaataatgatatcaccagagtggagaagtataaggaaaaccacatcatcatgctttggactctccaaatgatctcagagagaatcctactataagatgaattacctgtgcgctggttttataaatatggcccaactacctttatcgtctacggaacaatgcatgaaattctaa

SEQ ID NO: 74927 - DNA, 321 bp, Oryza sativa
  unsure (1)..(321): unsure at all n locations
gcacatgccacacanaccactcctcttcacagccncagcccatcatcccgccggcgcacaggggagcccgatccaaaccaatccctaccagaccctaccttccgctcaacccgaaacacatggacgatctcgtccccacagaagggactgaactgagatgcacgaagcggagaaaagaaaacaggagagagcgacgcggggggagaccttccgagccagttgaggagcgagtcccagagccccatgccgttcgacgcccgcagagaggaggaggtggagaccgttgccgacacacggcccggaactctctcagcgaggaaa

SEQ ID NO: 74928 - DNA, 400 bp, Oryza sativa
aatcactcgcccggatcttaatccctgcagcctgcactgatagcctgactttcagctaaaaaataacgttccgggttcaatttcaaatgcgtataattcaaaatcatatgaatttcatagactgactcgctttacggtaataagataatttgttgagttacatcacgaaaatgctatacgatgaaagtagttcaaagatgcaacacgtcatcactaaatgaaagttggaagtgattcagtataaaattgcgtaaaattcaaatccatatgaatttcaaagactggctcgtaagataatttgtgagtagacatcacgattcatgaatattcttcatgatgaaaggtcatagttgcaaccaagtcatcactaaatgaaattatgaaaaagaaagtaaaatat

SEQ ID NO: 74929 - DNA, 363 bp, Oryza sativa
agctcttccttctcattccaatggccgaacgggctgtggcgcacaacctctctccgaacgctagcggtgacgacggggagcacaaccctcgccgtttagctcgtgctccaccgttcccctctcgcctaagtcttgggcgggaaaaggcgctcgatgaagtctaaagattcccgacttcgccccccgcgggcgatggataatgactgcgagacagggagcgtcgccttctcgtctacagtgatggcagcacgttccatggcgcgcttcatgccgcgggtgcgctccttgcgtacccgcacgtctgccccgatccaaagactccactccgacgttggctggatgacgtggacgacttgatcatga

SEQ ID NO: 74930 - DNA, 468 bp, Oryza sativa
tgtcgattcgccatggctgtcctcgccgtcgctacgctcttctctgtggtgtgcctcccctctcgacgttcgccgtcacctcttcactgtcaccagatacacgtctaagctccgacgatcgctgatctgagcatgcctttgttctatggtaaatcccctgatgaggctatttaatttgaagagttcaatgcaactgatatgggctgctggtagtaatgttcaggcgaaaacgaactgcattccccggcccttagcagttagtatctgctcaacatctctcattgacgttctgccttcatgttcagttcaggacatgaatttaaaaaaaaggtactcctactatgatttggatgccccatgcatgcaagataaagccggtggtagagaggagcgccctgcgtcgttcatggtcagcttcaagatgttgattgagtttctttctacggtttttgtcgcagaaaggatacc

SEQ ID NO: 74931 - DNA, 381 bp, Oryza sativa
agcttaatcgttgaaacgacgaagatgttcaatgttccaagagttgtcgacaagtgtaccgtcttcgcgctcgagtcgataggaacctggtcgggtgacttcagagatgataaatggcccttcccatataggagataacttgtgccgatcttgtgtagtttgaattttcctcaaaaccaagtcgccgactagaaaggcacgggatcgaacattgcgattatgataacgtcgcagcccttgtaagtttcgagccgactgaatcaaagccgtttcgcggacttttttcaatcggtgcaagtcatccactctgtcctcttcgtagcgctcttcacggaaatttcgtaagcgcgaagactcgaattcaacttcactcggtaacat

SEQ ID NO: 74932 - DNA, 405 bp, Oryza sativa
  unsure (1)..(405): unsure at all n locations
cctgtttcctgcctgtaacaacttcagaagtttatattntcatatatatataagtctacttaggggtcataacacaaaccattatagttattatataaaacatgggcattaaacacttataatataagtacagtcattgggtgttcgctctttctccataactttagcgctggcaatatagttccgagctcatgaagatatcgggcgaaatgctggcgaataattctaagaccctgtgttcctattagacctacctcaacactatattaaatatacagctttaataactactcgttatgactgtgtcagtgtctcgaggtgtctactataaatcatgttatacaaacattatgtttgatgctcacataagagaatataacccctaactgcgtgatggagtattaa

SEQ ID NO: 74933 - DNA, 385 bp, Oryza sativa
ttcttgattggacatggaaaataatccattgcatcagaaatattgcccattgatacatttaagaatctagctttgcagaagttcaagcatatatagcataggtgtaaaggcaaaccaataaatagtaatttgacgaaagacagatacttgagatgggaatttatcttacaacatatacagatattcccagggaattgcatgagctattgtaaatactaatgggctaagctgaatacctggtcaaaccaatcacagcacggagcaaagatcacctgatcaacattagtcaatcccgatatacaaataaattagtgttgaactgacgtcggataactaacatggttcttttcctcaacaatactgctggagttattatgaatgatca

SEQ ID NO: 74934 - DNA, 382 bp, Oryza sativa
agcttaattcttttgatcaacgaatcaaccaaaccattttgtgtgtggacatatggaacagattgctgaacctgaattcccaatgccatacaattatcatcgaaagcatgagatgttaattcggcagcgttgttcatacggattgattgaatcctatgttcagggtaatttgtctttagccttataattagtgacattaatttggcaaaagcatggtttcgtgtcgatagaagacacacatgagaccatctagtagatgcgtcaatcaaaaccataaaatatctgaacggtccagatcttggcacaatacggccacagatatctccttgaatgcgttcaaggaatttaagtggttcggctctaatattgagataagatggtc

SEQ ID NO: 74935 - DNA, 431 bp, Oryza sativa
  unsure (1)..(431): unsure at all n locations
tgccgcganagaggaaggaagtgctcatcaagatggttctgtcatgctntgactctttgagtcttntggatgaaagttgtacattttttcaattgaaagttgtataccttatagatgaaagtgttatatttgaattaaaaagttgtgcgattttgatatgaacgctttacatcctgctttggaagtttggaatcttttagatgaaagcttcataattggcttacaagttttcatgattttgagttgaaagctntgtatctttgaattaaaagttgtacgagttcaatatgaaagtttcataattctcaattgaaagtttatatgaattgccgcgatgaaagtatgaagcacaaattaaaagctttgaatatggttagaatttaattggagtccgactcctcgacgcgagcatgagacgtcgtgtgaagtat

SEQ ID NO: 74936 - DNA, 387 bp, Oryza sativa
  unsure (1)..(387): unsure at all n locations
atcttttgctttcgaacacttcttacatacaggggttgtgcaattggacacatgcatgcattgccatcgtcgtcatcatctccaagattcagaaaaaaacattgaaagaaaacaagcactgcttttgcaatattcttgactgctgcanaggagatggaaaggatataacaccccctcacagatggcacaagaaaaggattgattggccattcttacctctttttcgtgatgttgatttgattcctaagacactcaagccaatgatcttcttgccatgaattggaagctcatgtttcctctgaagaattcctgcatcagcttccttcttttgcttaagctggatggaaaaaagagtcaatggaaaccaaggatgtgctgtttgcatat

SEQ ID NO: 74937 - DNA, 388 bp, Oryza sativa
  unsure (1)..(388): unsure at all n locations
ggttcgcctaatctctacgagaaaggaattgttgaggaggattagagatgattaatttcacatcatccctctaattacctcttcaatttctcttgagggagggattaactgaacaagacaataaattattctttttctttctgggtgtaaagcactgaaagaataccgaacgagaagcagttttgcacttgttcagaagttcaaacgctggacgaacatccggtcaaaaatattccaaactcacacgctgctactctatatatataatatattggatgatctgggcctagcaacttcttattgngccatacacagcatgttgttagctgggcctatnttttccttggaataagttcatatgaggtcccttaactctacaccgagttcg

SEQ ID NO: 74938 - DNA, 306 bp, Oryza sativa
attcttacagtacataccatgaaatgctggaccgggggattttaccagatgttgtgacctacagctctattattgctgtgttatgcaaggctcaagctatggacaaatccctggaagtacttaacatctaggttaagaatggcgacatgcctgattgcatgacactatatagcattctgcatggatattgctcattatggcagtcctaacaagctattggaacactcaaaaagatgcgcagagatggcgtctaaccaaatgtagttacatatagctcactgatgaattatccttgcatgaatggaa

SEQ ID NO: 74939 - DNA, 456 bp, Oryza sativa
  unsure (1)..(456): unsure at all n locations
tacggaactatgaaactaaagctgtgtngaacaagttaccgatctgtagcccgtcttttttctagtcttgtctcttttctctaagaacacagcttatatcttggtaactccgatggctatcacttcattatacttgctcttacaagttggtagtgtaataagagttgggtaaaagtaaacagccatgaattggggcggtgagatctcgagtcacccgagagacaacaatgcatctgttttggtatatctgcgagctgtacggccgcagggcgagacccttgtcggccggcacggattactacagctaggattaactgcagggatgagcttgagcttgcagatttacagcttgcatgcagcaggttttgcatggacccaagctagtactatcaatgcaaaggacagcgaccagattggctgcacctgacactgacacacacactggcatgctctcta

SEQ ID NO: 74940 - DNA, 386 bp, Oryza sativa
  unsure (1)..(386): unsure at all n locations
agcttgttatagtttcccttggagagagattaagacatggggaggctagccatgattcctagctacattatgttggctacatatatggcaacaaaattatttatgtgcattttgatttgttagaaagctgttcttgtcagcaaggggtactttttggatataaagaacaacatttctccaagaagaattctcaagatagaacaaaaacttgattagtagtattgacttgccatatggtgaatggaaccaaaatttcaagatggngtttgccatggttatcaaatgagcaaaacaaaagtactccacattntacatattataaattaattacataaataatttaccatcatatctaaggtatgttgtatttatctttttattattac

SEQ ID NO: 74941 - DNA, 406 bp, Oryza sativa
  unsure (1)..(406): unsure at all n locations
cgcggcgagggcaggctngcaagaaagactacgactagcactcacttcggatatgtgtgacaatggcctaacgagcggaggagctccgtctcggggatagccaggcgggaggaggagcatgacgtggccgcaaaccgccgccactgccgttgcactcacccttgccggatccatcgccgagccccccgccgccgccgtcgcccaagccgtctaccgccgcttgagcccgttctcccgagggcggcatcattggatccatcgcccaccgtgcagggcgagcatggcggcgagttgggcgagcgagcatggatggacgacggagcgagcanggtggcgggaagggcaacagaacgcggacagatgacggcgcgagcagggtaaagcaccggctcatgccgtgcgctcg

SEQ ID NO: 74942 - DNA, 412 bp, Oryza sativa
  unsure (1)..(412): unsure at all n locations
gagtacgttggttgtacgttttctatcgctttgattaaccaccataaaccgcgagttttgaagggaagtgattcaaatactacctccttttacgaccatcttatcgatctttgcaaggaccaaaagtagtatatacgacactcggtgatttcaaaaagaaagtgaaattaatgcaagttgcgaatgctntcatatctcttctctatctctattattataaaaattgaagatgtttttaatcaaaattttggtatgtcgtcgtctgaatccaagtgcgattttgtattaatttcgtttcacccgccgtctccaagatgaagcagagaaaccgcaggggaataataaaggtagtaaccaggttgcaacccactcctggtggcaacacgtggacaacgcaatgatccgacagaat

SEQ ID NO: 74943 - DNA, 380 bp, Oryza sativa
  unsure (1)..(380): unsure at all n locations
agcttcggatgtgcatcgactacaccgaccttaacaaggcatgtcctaatgacccttaccctctgcctcgcatagatcagattgtcgactccacggcggggtgcgaccttttgtgttttctagatgcatactctggttgccatcagattcgcatggctagggaggatgaggaaaaaactgcgttcattacccccgtangaacctattgttatacatcaatgccctttgggttaaagaatgcaggtcctacttttcaacgtactactcgaatttctttgggtagccaaataagacgtaatgttgagtttattgtgatgacttggttgtaaagacacgcaaccaagagactttactctcatgtctagcggaaacttttgaaa

SEQ ID NO: 74944 - DNA, 446 bp, Oryza sativa
  unsure (1)..(446): unsure at all n locations
tttatactaacgagtgcataacatatggaccattagagtttgaaagtgtatcatatgccatatctttagcttcactcaaaccctcacactaaaaatttagacttgtctgagtttgaatcagcttcttgagttgattattacttgttttctgtaaacatattttccaaaatgctaaattgtcaatttttaaaataaattctttacatagtttctttccataaaaaaacccccatctttttaaattgtaatacacgctaatagctctctggaaagccaattcattcaattgagtcgaacaatcctactgtaaaaatttggcaagcaaccaagggtgtgtttagtttgagggatatgcctatccagtttgttagtatggtttggtggtaggtgagggtggataggacaaccagaaagagaatattccacanagatgctggatgaccgta

SEQ ID NO: 74945 - DNA, 198 bp, Oryza sativa
  unsure (1)..(198): unsure at all n locations
ttctttgacacttactcacctattgctagatngaccacaattcgtgtgctactttccctagcagcctcacatggtcttctcgttcatcaaatggacgttaagacagcttttcttaatggagagctggatgaggagatctatatggatcaaagccactagtggatatgtcttcacattgggtggtggtgctgtttcgtg

SEQ ID NO: 74946 - DNA, 464 bp, Oryza sativa
ctctaaccaagctcttacaagatcttaccaatgcaagtggtatggtgacatacaccgactcaaccaagcaccccaatgaaggttggatgtatctatgccttggcaaacactcgcggtacagctgttatcaaatatgtggagctctgggtaggctttaatatgtatcaacagaatagcaaatgctcaaatcagataatgcaaagatgaataattgttcaaagtcaagtaccgtgctggtcctatgctagaacgtactagagacgctagcctatacacaaacgataccacaagatagcactatgaacaactcatgcacaactctgatatatgaagttcaactaaacataacagaatgttctcctttcttctttcttcttacttcctttcttattttattctatcttttcttttctgtatgtgtttgagcagctgttttttctttatcttttgcacatttctgcctt

SEQ ID NO: 74947 - DNA, 390 bp, Oryza sativa
  unsure (1)..(390): unsure at all n locations
agctcggtgtatatattgctatgacgaaatcttatcagattaatgactcatattttccaatgaaagcccatgaacaataaggtcttagttcacatgatcgccacataaaatatctacctcatggaactccaggttgcacgctctcttcatttggttgataataatgcacaataatagtcagattgaagattgaaaaagcttttacacaaagcagagtgcagtatagcattctttnttatattgcctcagtagcaacattgggatttcctttctccttgtctttaccttttcnagactattcatcatcactaaaagtcaaccgcatgagatattattcatttgcttaatatgctagttattaacaccagaatatcttttttcaagggaata

SEQ ID NO: 74948 - DNA, 265 bp, Oryza sativa
  unsure (1)..(265): unsure at all n locations
agcttggttttctcttatccgagaagtggttactgatttgattctccagtcgctacctcccagctttgagcccgtcataatgaatttcaatatgaacaacctgaacaggaccttggcagaattgcatgggatgctaaagactgctgaggaaagcattaagaanaactccaaccatgtgatagttgtgcataagcgcaagcccaacaacaagaaaagttgtcaaaagagaaagctaaactctgatgagatcacgagtactagcaac

SEQ ID NO: 74949 - DNA, 384 bp, Oryza sativa
  unsure (1)..(384): unsure at all n locations
ntccataatatcgaaaatacatcatatgagtatcacattgtttatatccccaagttggaagaagctgctgactgatctgtcgatattaacttcttctgccctctcataagtggcagcaagctcggctagaaaaaatccatttgatacgaaagcatcgatcttagcttcctctactctcataagtggaagcaggctcggcaagcaaaaatccatttgataccaaagccaagtccattttgggacgattgaagcttgaagtttgtatatagatgtctgttcccttgtttggagggagtttttatcaatgtgattagaattccttgttcaagctggattcgtggctatgggcaaccatatttttagatatcaacatatgaggggttc

SEQ ID NO: 74950 - DNA, 395 bp, Oryza sativa
  unsure (1)..(395): unsure at all n locations
agcttggtccaagggttgccattcgtttgctctcccggctagataactaatcctatgtgatttgctagagaaaaggacgagaanagatgtaaggactcaatgaaagttcagttgaatcaactgatattggcagataatttcatccacacaggtagctgatattggaaacatgcatgactagggacatgcactacttangacatataaactttacagagtctcatctcatgctaaaccagcaaagcttggtgagataatggngccaaggtgcactcagtttgacaaatttcagtagttcttaattgagtttgaaaattntgagaaacaatttcaactaaaggatttgctaactgtcagaatgtgctaagtggagccatgaatcacaccaattcatg

SEQ ID NO: 74951 - DNA, 451 bp, Oryza sativa
tatctagctaatggaaaataatatactttgagtagagcggtgtttataaatataatggtagtctactctactctacctacaaacagtcctaacgggatgttatttttcattttaatttgttaatatttacagaaatattataccgacgaaaatatctacagaaatagaccctgccatccaagtatagagcagcaaggtgacatggcacacggcgccgtgtgcgtattttgcgctgaggtcccttgctggtaaatgcagattttgcctgctcagcggcctccccgagggcgggagggtatatttctgtaaatattttcgtcagtataatatttcttgtaatattaaaaatgaaaagtttgaaatgaaaataaattcgtcctaacggaagcagaagcccactagattagctagaacacccggcgcatgggcttggcctacccactttgatatc

SEQ ID NO: 74952 - DNA, 464 bp, Oryza sativa
  unsure (1)..(464): unsure at all n locations
cttagttatttataaattgtatttctgtatggactctaaattctacttttaattttntttaattatgactttcagttagttcaaattcctatatgaaccttatattcttatttcaatattcttattttttaatttcgaatttatgtttttataaattatattcctatatggactctaagttttntccaatattctttttttaattccaaaataattatattcttatatggactctagactcttattccaatattgcttatntntaatttctaattcttaattntaattatttctaaattatttttctatatggactctanactctacttttattggttntcttaatttcgactgtcagtttggtctagaatcctatatgaactctagaatcttctttcaatattccgttttttaattccanatantcgttgtttctaattagatttctatatggactctaaact

SEQ ID NO: 74953 - DNA, 259 bp, Oryza sativa
  unsure (1)..(259): unsure at all n locations
taatctggcttacaaattataataatctatcataataatctacttggttgtttcagcttactcataataatntagattataataattntaaactgaatcaaataggaccttagccttggttgcatctatctattgagtgattgagttatctggatcatatgatatgctatttggttagtttccgatggatgcggataaaaatatggatatacaaactntgttgctacactgctatccacagaacacaaaatgtacatca

SEQ ID NO: 74954 - DNA, 373 bp, Oryza sativa
  unsure (1)..(373): unsure at all n locations
taattggtaaatcgttggttcatgggtatactatatatacattctcgttacgtnatagatgggttcatcttctctttattgcaacacatgacatgatatgctatatgtatgctaagctcttgaacattaatgaacataatatctatgcttaatgaaatcatcgtcaaaagggggagaaaatatgagatttgggagaagcaaggtgaagttttggagaagcaaatgagatgagaagagcatgttgtttatggatcaattgggagttactttcttttcaaaagtgagagaagtgctcttttcgattattagcacgaagtgacgtttgacgaagtgagcttttatcgcttctgatttatgttataaacaccaaaac

SEQ ID NO: 74955 - DNA, 188 bp, Oryza sativa
  unsure (1)..(188): unsure at all n locations
gtatcggagtattagccgatatatgctagatctatctgatcggctatgctataaacatatatagtcctattattaatatatatntcgatctaagtgatttatactgtctcagcatggcgaccgatctatcccaatcacttgatttanatatatatcgatataagaacctatatattggaatatctaca

SEQ ID NO: 74956 - DNA, 310 bp, Oryza sativa
tttttctttatctctttaaatcgcaatggatatcgtaacattatatctaactcgatgcactttctataatcctgaatctttagatccgcttcaaaattcatgccggtgaggaacgaataaaatagactcgacgcatgaacatgtgagaagattcgttcccactaccgacatttcacgataatactctggttcggttgatatattcgctacctattcatcatatatgttacgtagtctaactcaaatattcaatgtatttgcatcgattagatcttctctacaggtttacctgtattggctaaattgattt

SEQ ID NO: 74957 - DNA, 360 bp, Oryza sativa
cttttgcggtaacatgtgtaggcactcgtgaagcatgatcatgaacagcgaagtaccgtataatcagatgcttactcataggacatcttaactcgcatcctattgaagtagaatgtgtaacataatcataagttggtacagactatactatcacatgcttagatgtagcatggtcaattgattataaacatgaatgaactgtgttcaatagacaaactaaccaagataacgtttagtgccattcatggtggtaatattgcatgtatgcctgccctacactaccagcagctcaatttcatcctatgctaagataactctcaagttggagagatattgagtatgaacatcattgtggctctt

SEQ ID NO: 74958 - DNA, 436 bp, Oryza sativa
ctataaaactaagctcgtatgataattgcctcgttgttagccaccattgcccatatgaataataatacttactatgacctacatacatttacatcggttgaagagagaacaaagagtgtgctgcaaagagccttcttctcattgggtgcttgcatcaatgcttttgtgcattgtcgacctgttctatgcataaatggaacatttatgacaggtaaataccgacgtcagatattgacagcaattgggtgtgatgggaacaaccaggttctacctatggcttttgcatttgtagagagtgagaacactgaaagctggtactggttcctagagagagtgcacattgcagtggtgcgtatgaggcccaacgtttgccttatacatgatcgtcatgcgggtatgttgcgggctattgactacttgtagaacggttgggatg

SEQ ID NO: 74959 - DNA, 427 bp, Oryza sativa
  unsure (1)..(427): unsure at all n locations
agctttttgtgtacatcaaaggcccacagaagtttcttgaagcgcatgggctggagcaatggtggtcggatggcatggagctgcagctagcagtgtatgacagcaagcttatatacaggcagttgaagtccctctacacagcaactgcaccgtcaccccctgcaaagtagtagaaactgctgagatcgctgtttcaactggcgttagaaatactctntctaatcagtttctgcctctattaactngatatgtttcatcatggttgtgactgtgaactattatacagtaaaatataatanacggacatgtgctgataaatacattgatattnntcatgttccatcttctgtcagagggtntcaagactctaaattgttacaacggatataanggatactagtatgtctggataccgattagcatccat

SEQ ID NO: 74960 - DNA, 470 bp, Oryza sativa
tcttgaggatgaagctgtgttttagctggaaacattatcttctgcaatactgaaaatgtgtgttctgattatgtgctactttagactttttagcagtactactaacagcagtacatatttagtactagtagtacttgtaaggagtagtaattgagatgatacggattggcttttcagttggtcaagctcatgagtttggattctggaagcagcagcagcagcaccagcgcatctagctaaaaccttttttaaaaaagagaattaagcagcctatccgtgagcgggacacggtgtaaccaaacccttaatcacgaaccaaacgccaaattctttaattagtcagtcgaggcagcagggacctgcttcaccttatcttcttcgatccgtcacgcggggcctactgaagtactgatccggatcactaactaaatagtaccagtagcatcaaagttcctactactggagtactt

SEQ ID NO: 74961 - DNA, 302 bp, Oryza sativa
  unsure (1)..(302): unsure at all n locations
tcagctcggacccgggatactctanagacacctgcnagatgcaagcttctgagtgtactcaagctcattatcgacgaggcagaaaccaataagagtcgggtcagaaagaggcagaagcgaaatgatccttgacatgaaagccagatattatagaacacttcaaacacacaatattttaaatcatcaatacgacagactgcatgccaaagtcgctcaaaacaatagccactgttactagcataaacgtaagttgtgtggtactttatgcagtaggaatagattattggagaaaaaaaatacaa

SEQ ID NO: 74962 - DNA, 142 bp, Oryza sativa
actagctttaattgatatatggattttacattgacccggaatgttaagataataagtgaaaggctcgacatgttttggttattttcatgcaaatatcataaaattttggattggttttggatggtttaacctgggttaaatt

SEQ ID NO: 74963 - DNA, 275 bp, Oryza sativa
  unsure (1)..(275): unsure at all n locations
ataatttaatttttaagtttataataattaaaacttaattaatcctacgctagtgactaattcaattcgaacgggacaagtgcacactccaaccatccccttgctctgtagaaacaaagcacctccggcttatttggcaacttgagggaaggggattgagagtttacacgagggaattgatggtgagaataagatgggaatttattnttcatcctagtctcttgtttggagaggtggtagaaattgtanggagttagttgaagatatatcataat

SEQ ID NO: 74964 - DNA, 326 bp, Oryza sativa
  unsure (1)..(326): unsure at all n locations
tgatagtgatccgttcccgntaatgtgattgactttgtgtacaagaaggtgcagattcggtctcatcataccgaatctactgaggggaagaatgtcattgntgatgatagtattcctccaaggatgataaaaccaaagaatccataagtgggagtgtggaaagtcaacgaaaaaggaaaagacgtactccatagccgataccagcatttcagcggatgttggatagatatgcttctgaaaaaaagggtgatgtgttttcttgactcggaggtgttaaacggccaaggtctccgcctaggtgtgattttgatgattatgcatgtaat

SEQ ID NO: 74965 - DNA, 388 bp, Oryza sativa
  unsure (1)..(388): unsure at all n locations
accactgggtctagtaccagggggtaccgccccgggtggaccactcggtcaggatgatccgagcggtcaaacttgattgcaatctctgaccatcgaagatactgtggcgtgtcgggctgaacagcattgatctcccgttcagtcaacttctgcttccgtttagactcataagccaaggggccgccgaagatatggttgagctccttgcggtggtcttgaaatccagccggggtgtcgccgtcgtccttcttccttgacgtgctttngtcctcgtcggagttcttccgagcaggcttggtatactgctccgcgaactgcttgtagatgaagcactctttggccacgtggttggagttnggatgatgcgggcattgggagttcatgatct

SEQ ID NO: 74966 - DNA, 442 bp, Oryza sativa
tctcagcttgtatagttttattggccattggacatatagaaacttcttcaattatactaccatttgatttttttagataatggaactaccatttgatgaaacttgctgactaagatttacttagaaaaaacaaagattttagacagcaagagttgtttaattaattgtattattggtagagctagcttgacttggtagctagatcgaggtacgttgacacatgtgatgaactaaagcttgcccaagtggcacaattgcacaagaactgatctgatccactgagatacctatatcagtacgtgtttgcccataaggagccaaaggaggacgacagttcattaaacaagtcatatgtggactatcgatgacaattatagaggccgaagcaccaattcatgttgtgaagcttactaccacgtttatgaaataattatgagcacca

SEQ ID NO: 74967 - DNA, 357 bp, Oryza sativa
agcttcacttatctatgttgagtccgcgccgaagaggcgcgaagatgacatcctcacaaaggcgctcggaaccaaagaacatcctggccgaactcggggaattggtagcgatgtgccctggaagcatggactccctcagtacagctcccaatacaggaaacggaaagtctccaaggaagagagggacgctcgtttgaaggccgaacttaaggttgaggtcattcaagaactagaagctagcatgaatacaagggtggaagaaagggttaacaaggtgctcgccgacatgaatataccccgagtcacaacacctgctgtgcaaccaactcctcgtgtcaacatgacgcgagtccgcac

SEQ ID NO: 74968 - DNA, 134 bp, Oryza sativa
taggaaggttggtatcttatggcactgagatctctgcttttgcatataaggggaggatcaaaatagtcacagggatcaatactacggagcttctggtgtggtacccactaaaggaaatggcccttattatacaa

SEQ ID NO: 74969 - DNA, 357 bp, Oryza sativa
  unsure (1)..(357): unsure at all n locations
actaagtatattatgcataacaagcgtttcgttcttgtagagtagataattggattatgattgagttatttttctaaaggaaaaaggaaaaggatgattcataatccttttttcttcggactgtcccaaacacaaaatacctccttgtattctcactctcaaatgagagtggaagagatttcgactttcatataatatcttaatagaattccatgtaatgatcaatgcattttttggattctatattattcgcatgtctagaatcctaccaagagaataccccncattttaatgttattgaacgatgattgacgaataataaataaacataatactgtctattagtgtcgcataaaa

SEQ ID NO: 74970 - DNA, 297 bp, Oryza sativa
  unsure (1)..(297): unsure at all n locations
gggatgcacaaataatgcttcatgatccattacgcgttcaaggccttctgatcttcttcgcattcgctattttggcacaaggttctttggttctcaaaaagaaacagagtgaacagggtcaattgtacgaaatgaatttctatgtcccgggatttcttaccattccagtggtacaaagccgcgaattattggcgatcgctagaattctctatgatccattatggaaatcttttctttggtagactactttttgttagcgagatgtctngtctgctattccttatttctatcatctca

SEQ ID NO: 74971 - DNA, 416 bp, Oryza sativa
ctcagcttcggctattggcgaaaaaaactagtcggataattacacaatttatacacattccggctatactaagtctatttcgcattacaagcgtttctgtcttgtagagtagattattggattatgattgagttatgtttctaaaggaaaaaggaataggatgattcacaatccttctttcttcggactttcccaaacacaaaatacctccttgtattcgcactctcaaatgacagtggaataaatccgactttcatataatatcttaatagaattccatgtaatgatcaatgcattattcggattctatattattcgcatgtctagaatcctaccatgagaataccccccatgtttatgtaattgtagtatgatttgctaataagacataaccataatactgtttattagtgtcg

SEQ ID NO: 74972 - DNA, 93 bp, Oryza sativa
  unsure (1)..(93): unsure at all n locations
agtcccggctggtagcaccaaccgcggctaaagatcaccgagatcattagtcccggntggtattaccaaccgggactaaagctaagatcttta

SEQ ID NO: 74973 - DNA, 471 bp, Oryza sativa
ctgatagtttccctcatattcaaatcacttaggtgcatttatacaagttgctttggtgaaactaactggcgggtgaaactcttgtcattcctaacccccgtcgagttagtccgttcttgcttcattgtacagaatgaggaggcgactgtctcgtctattcaagggatccggctcttcatcaagtcatcatgacgagtctagtactcgttcatcagctgatgattcgatggaggatgccgaagttccgcgacgactcctgaacgacaccgacctcgaccttgtcagtgatcgggagagacaagtctactatatgctgagcgaccgggagtatgctgacacgcaccggagctgctgaaaaagataggtatggatgttgaatttcgttctatttggaaagacggtggttggcagagaatatgctggggtagatgagcctggttctcgcttgcttactctgcaatttctgtgcac

SEQ ID NO: 74974 - DNA, 412 bp, Oryza sativa
  unsure (1)..(412): unsure at all n locations
catgctactcgatgatcacaccgcctatactataaatcaatggtaagtcacctcactggcttaaattatagttatttactatcgttaagtttttttgccaactaagcacatggtcgggtgctacatctatcaggtgcattatttgatgagccctccacaagctctttgtgagatattaacatgacgactcaagaagtaagcactcaggaagccttcgcaaggaacattgaagcattaagtagtgatcatcaaccatggaggagactgcaactctactatgaatgtctcggtggtactgtgaaaatatggttaccggtcccacatggcctcatatttattnagataggggtaagcagaccatctatatatatctctattggagctgacctattaattttatgatatttctcac

SEQ ID NO: 74975 - DNA, 416 bp, Oryza sativa
  unsure (1)..(416): unsure at all n locations
atcttgttatataggagatgggcattgtggggtgtgtactggctggcanatttgactgtgaagttgaactccaagtctcagccaggaaggcaagaggaagatagctggtcaacgagtggtggagatgtgtagctacgatacgaacgattagctagtccactagttagtggcgtggtagcagatacttgtaagaactggatatatagctttttgagtttgattaggtaagatcaactgacttggatactccaacaatatttgcattttctttttcttctcggnttaattacggtgatataacgatgtatatgtgtgcgtgtgtgtgtatatatatatatatatatatatatatacctcacgcaagttattagcacgggagtgacatattactacatatactatttgcgatattaaca

SEQ ID NO: 74976 - DNA, 321 bp, Oryza sativa
aatactcatgcactctaggcgatcatgttcctagcagtgagaggagttctggcgctcccgataaagaaagtcccacaattaaatatggtcaagtaagtctctctatacacctatggagcctaacaagggacccgagttggaccctctaccctactaacggtgtccacgaacgcacctgctcactcatggtgaccactatgctggaactgctccgtcggtatctatccgtatgcttacccatcataagacggtgtccgaggttgtcatgcttcttatggtacccttatgacgggacgacagcttgcaatccaccaatcttcg

SEQ ID NO: 74977 - DNA, 406 bp, Oryza sativa
  unsure (1)..(406): unsure at all n locations
gggatatttcactagcaagttggcagatgttattcgatgtataacgcggcacgcggcanaggctgattctacccatatataacaaagggacagccatagataaatagatcaatgcttctggaattatcacaccaacaggcttctgcaaatctactcctatgtcaccatgtcacttttgggccatagaaagtaagggatgaaattctactcgcttcttattcggaatcgaccctcctaacagcatcatcatcaaatggacataactgctgatccacaaggaatctcagctcccatcagtacttgatggaaagcggatggagctactttcagatggttctggcccacatcagaattctcttaagatgctgggatctagcaaaataaccacataccatatgcagcccga

SEQ ID NO: 74978 - DNA, 309 bp, Oryza sativa
  unsure (1)..(309): unsure at all n locations
ttttttccaagtctacaagtacttacattaatgaaaatagctctttctgccaagctaaaactatgactggataaaaataagcaagacctacaaagggagtctgaacagataaatctaagcaacataacgacacggtgtagagaaaatggaataaaggtttatacaagacaatacgatagtaacttatgtgccatagtaattacgacacataagcatgactattcataattngaagattacatgataaagtggacacaaagaagacctangaccaccgactatgaaggcctgataaaagagtattctatt

SEQ ID NO: 74979 - DNA, 432 bp, Oryza sativa
  unsure (1)..(432): unsure at all n locations
ntatctgccctgatcgatggcattttctcttgtgttaggctataatactctnttccggactagtcttctatacaaaatttatacgtataaagtttatcatagaattgtctttatctatattcctagaaatattggacatgtangctggaaaaaaggcctaataaaaatgaaaggccagatcaaatctatggaaaaggaatatggtagatttgctaataaaggaaaaccagatggcaataaacctatcaaataatttgcaaaaaaggaaaggtccgaagcccatcaaacattaatatgcaaaaaaaggaaaggctcagagcccatcaaacaatttgttaaaaaggaaaggcccaaaatcacatggacaagatcgcaataggttgacccgatcgtgcggatctggctgcgtgctgtcattgccggttagcattt

SEQ ID NO: 74980 - DNA, 216 bp, Oryza sativa
  unsure (1)..(216): unsure at all n locations
agcttatccttacgctcaggaatggatcagtcagaacatcaccaaccggccgcctcgtctgccgtcgactggtgcttccgcctgcacggctgacttattatgccgccgttgttgggcgtctacgtcttcaccgaccggcttggcttcgccgccgccgactggtgcttncgactgcacggctgacttattatgccgccgttgttgggcgtctacgtc

SEQ ID NO: 74981 - DNA, 464 bp, Oryza sativa
  unsure (1)..(464): unsure at all n locations
nggtagcctctctgtcccacttgatatgtatctcgttgtgccctgatgtgagatgaaatggaatggaatgaagcctgatggtccgacatgactctatgtgctgcttangtcactgaacgggttctttccgtttgtgctccaggcaaaccttacgtttctcgggttctttgcaaattccgggtgtagtgcatcaaagtttttccactgtcgagcatcggcagggtgttgaatcttaccgtcatttttcctaccctcctggtgccatctcatcaactcggcatcggtacggttcgaaaatgtcacaccctaaaaatcctaaatttataaactattgtttaaatggaattattagaaatgaatttaagagcctagaagagaagatctaattttaaataacaaattccaatataaaagtgggctagataaaactttattaaataccttctcttgattctatagntcct

SEQ ID NO: 74982 - DNA, 252 bp, Oryza sativa
ctcaagaaccaatatgagacactctccatgttgcctcatgagagagcgaatgacatgtatgggaagctcaatatcattgtgaatgatctcaatgggcttggggcacactacaccgatcttgaggttgccccaaagatgcttacggctctactagagaagtatgagacccttgtcaccatgctcatcaactcttacatgtctagaatgacacccgcacgcctcttgtggaagatcaacaccgatgacatgtac

SEQ ID NO: 74983 - DNA, 454 bp, Oryza sativa
cggccttgatactcagcttctgattaaatgaacagagaatagtttctcttatcttgttccacaacattcactacaataactaggccctgcttatattcaaactactctgaatactcaaatctattttccttttgactccaagtcattgattgagttggatttattactaagtctccccaacacatgcatgccattagtttggcactgatacacacacctttcttgtgacacacactaagaactagttttgcccaagcattggatcaataatatcactactctcttgtttcttctctaaatacgccattgagtctgacatgatgtttaaccattcgctctattaaaaaaagagatataaatgttatatctatgttattgtgacatagtctattattacataaacgttaataatgacttatacttgcatatgttcatagaatttataaataatgtg

SEQ ID NO: 74984 - DNA, 387 bp, Oryza sativa
  unsure (1)..(387): unsure at all n locations
cataacccttttccatttctgttgccatctgatttcacacaactacgtggcaaatgtcatctaattaatgaatgtcagatttctgccaactctgaacaaaagttagcccatcaagttgatcagaatttcattagtgttggcaagtgataattaattcttccaatcttttactgatctcctgagttacctgaatttgctgcagtggatcaactcaattgcacgcgttngtatatgtgcagacagtttggatgagaaatcaaccatgcatatttggatggattactttggaaatatacagtgatatagaatttcgtgtaatttgtgtatgtctcaatctgaaccggcagtcgatcaatcagacgatgtanagcgtgtgatctctctgat

SEQ ID NO: 74985 - DNA, 461 bp, Oryza sativa
  unsure (1)..(461): unsure at all n locations
ctgcagctgtcgctgacctctatgtaaatgatgctnttggctctgcacacagagctcatgcttcaactgagggagtgaccacaattttgaagcctgctgttgctggctttctgatgcagaaggtattgccaaaatgaagtctccatcctggtcaatgtttgcttaaatatatattcctagtaatacataggtcccgtggtaataactcataattaggaattgaattcatatacattattcacctcaatcctcaaccaacctagtttgtattcatttcaaagaagcaataccacccttaggattggcaaccacccaatagtccaccgaagagtttgttactttacgagtangaaataacatggaatattagagagaagtttataagtaaattaatatttttttaatcttcaatgtattcgtccaaatatgtcgcataatgcttatttcagaataacaaatac

SEQ ID NO: 74986 - DNA, 385 bp, Oryza sativa
  unsure (1)..(385): unsure at all n locations
agcttcatgtcattatggcttcagtgggtatcaactatataggaagaaaggattatatagcttacaaaccattaaataatcattaaggcatattgtggaaattacgggtaccatatatcacatagacagcttatccgattggagataggagctaggccagatccgtatgttatgtaaatagattaggttttggacattgtattgccttgtgttctaaggcatagaccgtagtcttaatcttatacgattatataactgtgtaaggaaatccatgtcgtatctgactaggtttttctccttgtaaccttgtcgcccaacctatataangtgggcaaggagcacttccatgacataatcacaccaagaatgttagatcaatacaaca

SEQ ID NO: 74987 - DNA, 396 bp, Oryza sativa
  unsure (1)..(396): unsure at all n locations
acggacctaagaaactcaagctgagttacacaagcttggcttcttaatcaaaggaaatcttctcgtatatactattagggatatgttattttcatataccgtgaacccatgtataaaaagtatttcttatccttgacactgaaacttttattttctcgtaaaattatatttatcaaatacaactcctaaccataaattggatttattgtatatatatcgaaatngctggttcagtgtattggaaataacggataatccatgtctagagtggagaatatcacatattaatactggactgatactttttattaatttatattagtatagattagtggccatatacaaaaataagagaacacgcagtaaacaaagaatgtgtntggtgccatgggcaaa

SEQ ID NO: 74988 - DNA, 281 bp, Oryza sativa
  unsure (1)..(281): unsure at all n locations
cggtatcgatcagnttcgaccgtcaatattactaaaacaggagagaactagtgatgcttgcaatgcataaatatgttagagcaataatattccactagttttaggtatactaacctttttgtagagaatgacaataaattggaggagaatcgacatcaactccaacgatgaatcaatcggacgatgtcgagaatcagacttgtgtatgagtgaggcaataactcaaaattgacacgacaaactgtgccaaatatcacaagtcagcggagaagagaagtcca

SEQ ID NO: 74989 - DNA, 462 bp, Oryza sativa
  unsure (1)..(462): unsure at all n locations
ngngttaggttgtgttctgatgcaagatgggaaggtggttttctatgcatctcgccagttacgtccgcataagaagaactaccctactcatgaccttgagttagctgcagtggttcatgcgttgaagatttggcgtcattatctttttggtactcgtacggaggtgtatacggatcacaaaagtttgaagtatatctttacccagccggatctgaacatgagacagcggagatggctggaactgattaaggattatgacctgngaattcattatcacccaggaaaggctaatgttgtagcagatgctctcagcaagaaaggctattgcaatgctacggaaggatgacagttgccattggagttatgtaaggaatttgaaagattaaatttgggaattgtcagtagaggtttcgttgcagccttagaagcgaagccactctcttcgtcaagttgagaagccca

SEQ ID NO: 74990 - DNA, 410 bp, Oryza sativa
  unsure (1)..(410): unsure at all n locations
agcttgctgaatggtggtagagctctccaccatgagttgtaaccatgccaccagctccagaagtttgaggtcggataagcatgtgtggagcgtacgcttttaacattgctccagcaggtccgcatgtagtaccaagtgacgctgactgtgtggctgaaaactctttggttagaaagtattctggccgcaaatcagaagaagatgaaggtggagccacaggagcaacagcgtaattgaggggatagggagcaatatgcaaatcagtaatcgatgacgctgaagggctatagcttagagtacccattgngtgatcaaacttgcaagtcggaccaaatntgcaaaatccatgctgtgtatagtaagcacatggttggctaccctgcanatcaaagaanacttcatatgaataa

SEQ ID NO: 74991 - DNA, 398 bp, Oryza sativa
  unsure (1)..(398): unsure at all n locations
tatncgtcttgtcaagggcaataaagatggcgatgccagaatcctatgttttatgatactgggcgatgtgatgattgtgatcttcagagactcttcattgacgtctaatgagcaaacagcatctgacctggaaaagatctctctaaagtattttctccgcatgtatccatcatttgcagaggatgaagatccaatatcctatatattgcccagaaaacttctggtaatgctgatggagcatgattatgttaacgtttctgatattctcaatgaagcaacagtatcccggtgctttgaattcttgctatgagatttgtctaatgccaatgtaagtaatgtcaagctctgctttgcattggcatctgctcccgatatggacaccgacattctttctcagc

SEQ ID NO: 74992 - DNA, 249 bp, Oryza sativa
  unsure (1)..(249): unsure at all n locations
gtatctgagttttattatatatctattaatatagcgcagcagaagtctctccaactggtttcagtaaaaaaaaaaagtatccgtagtttagatgcatggactcagcacaatctctttattatcaatctaccatacgtagcaagtggttctcactagcacaaagtgagtggataattcaggctagtctgacatgtacagcaacaacattacagggcanattatgatttaccattcaccaaaatacacagt

SEQ ID NO: 74993 - DNA, 461 bp, Oryza sativa
  unsure (1)..(461): unsure at all n locations
cttgaaactaagcttctttatattgtcttctcttgcagccaaaagattgggatgacagggaatatattgaagatcctgatgaagttaaaccagaggtttgcaatttcatatttgttatacattgataatacaaataaagaacgttatgtaatcttttaccttaattttccagggctatgactctattcctaaagagattcctgatccaaaggacaaaaaggtttgcacttaagaattacgctgtaaatccagcttctaatattttcgcatttaattggcatatccgtttataatggacatagngtcatatgttcttaatattatgagaagaacccgagtgcagacaaaggttccatcttacctggtcaagcttgtttcattagaaacatcctatggcatgttagcactttctatctgctattagctatattgaacccagcatgacctcaatggctcttatg

SEQ ID NO: 74994 - DNA, 391 bp, Oryza sativa
  unsure (1)..(391): unsure at all n locations
ctgccgntcgccttgggaacgaccaccgggttcgccagcctctcctgatggatgacctcacggatgaatccggcctccagaagtctcgccacctcctcgcggatgaagacttgacgttccggggcctgccgccgcactttctgccggaccggcctcgcgcccggccgcacggtgagacggtgctcaatcacctccctgggaaccccgggcatgtccgctggtctccatgcgaagacgtcagcgtttgcccgcaggaaggagactagcgcgtcttcctatttgccatccacgagaccaccgatccgtgggtcttggatgggccgtgcccaaggcaacctcctttgaccggacctcgtctcatgtagcgatccgctgcctcggcgcggtgggg

SEQ ID NO: 74995 - DNA, 222 bp, Oryza sativa
gacggcatggtgagctcggcagcagcacaatcgtgttgtggcggtgaggaactctcggaggcagcgaggagcgcatcgctgacagcactgacgagctctcggcggcggcacggaagaggagctctccttggaaccgcacgctggctcgctggaaccgaacgctggcgactcatcggactcctcggaggcattggcagcgcacgacgacgatcttctaggagg

SEQ ID NO: 74996 - DNA, 288 bp, Oryza sativa
  unsure (1)..(288): unsure at all n locations
cagcttcatgtncagtcgccctgttgggctgatacttgccatatgggtcttcaagaatggtgattactaggccagtcctcggggactttcatgggccttgttcangccgatctaaagccagaagggccataaaaaagaactgaaagtttgactgctatttctttttttatcctataatactttacaagtgatccccactaactcaatttcctgtactgtggttcatccacgtcatccaaatcaacagcagccggagagtccgatgggatcaccgcggaccccacatgg

SEQ ID NO: 74997 - DNA, 374 bp, Oryza sativa
  unsure (1)..(374): unsure at all n locations
agcttattatcatggtgtagataattaggagaaattntttagatatcttaaacaaactataatacaacattagtgatgttggtgataaatgtactcccggctccaaaaccaaggtgaccattatgtttttgcaaanttttaaaatttaaatctctagaagtttgtctgaaatttcagatctacggcatgcattataactttatcaagattaaattttctacgggacataattgggagcattttggcaattgcagttaaaaagcattggttctaaagcatcatctcccagaattgtacaaccggcaatagatgtgtagagtgaagactaagaattatgtatagaanatccttcanatgcataacagtgatttcct

SEQ ID NO: 74998 - DNA, 443 bp, Oryza sativa
  unsure (1)..(443): unsure at all n locations
tcttagntgttgtcttccttgtttccaaaacaaataaaataacattgagtttcacagggagaattatgacactgaaagatctatgcctttatacagcataatagtatgaacccatcatgtcagctcatgccattcattaatatgatatcatcaatgtttcagatatgggaccatggaagagttgaaggaggctgtgaaacgttttcatgaagccggtatgaaggttcttggtgatgccgtcctgaatcacaggtgtgctcaatttcagaaccaaaatggcgtctggaatatttttggtggacgccttaactgggatgatcgagcagttggtgcagatgatccacatttccangtgaggttccaccttcccttgcaaactatttaattagaattatttgaaaatgtcattcatgaatggtcattatgntaactaagtttcacaa

SEQ ID NO: 74999 - DNA, 420 bp, Oryza sativa
  unsure (1)..(420): unsure at all n locations
agctnttataactgttgtcaatgaattatgtagcacaagtgaaattgatgtagcataatgaaagtatattagaccatttcagatatgtatatgaatcaaatagaatttgcataacattatttatgtgcatacacctgtgatctaaagccacattatccacacagaaacaatttcaacttagaaccatggaaatcggcttgttcatatagttcatactaaattcattgataaaggctactgtatgtggatgtcatcatcaaaatatatagcagggaacagccaaatttagaaacttcttggcacgcagccaacaagaagtaactaaagggaataaacaaggggtagaaagcantataattcagtctggtgcacaacagaatctatgtaaccatcatagaagatcttcatctctacaagaga

SEQ ID NO: 75000 - DNA, 424 bp, Oryza sativa
  unsure (1)..(424): unsure at all n locations
tatattctgggacggaggtatggcagagtttactgttctgtcacattaacaatgncgcgtgtgaagtgtacgtatatatatgctagctcgtgagcttactggtattcttcgtcctttcaaagtttcccacatgaactctacaagcaatataaaaagataaatatgcttcaagcgctcctattaattatatttgcttctccacgatgtgtaattgctctatagggatatgagtattaatttgtttgtaatggaagaatgtattactttgattattggatttggaggtattgggaaaatggagatggcagcgattcctcactctgctatatatgcttaatgaacaggagcaagcttttgcatttgattgagcacataacatctgggatcaaccaagctttatatactatgtttgacttgagtaatc

SEQ ID NO: 75001 - DNA, 317 bp, Oryza sativa
  unsure (1)..(317): unsure at all n locations
agctngattctaagtgggaaggaccgtacctcatcaagcacaaatccaagacgggatcctttcaactggcgacaccggaaggcgaagagttcgaccattcctggaacgctacctctcaagcgtttctatgtctagaacgggtgacacccaaatcgccaacttgtaaaaatgtatatattgttatgtaagcccttcggcaactatgtaagcctttcggcaagagaaaaaagaagaataaaaagaggaaaatggaaaanagacanaacactggatgtagggctattatccaccacggacgcccgaaccagtataaaatc

SEQ ID NO: 75002 - DNA, 413 bp, Oryza sativa
cgcgaaaattataccatgacaacgcccagtgattacttttcctcaccaacaacctgaaagatgcaagaagaagcatacccagccacggagacagtagccgaaggtcatccctcgactacggcgggcgaacaaccccgaaatcatgggaatttataggataaaattctcaccgcatgaccacataaattttagctagcgccccttagcatatgtagccttctgtgtgtgctgcagaattggccgaagaacaacataagtcgatgtctggcgggacaagtgcaagtaagtcaagtataaatccccggcacaaaagaatggccaaccacagtgaagttataaaagaggttgattctagtggaagcccacatcgcccagaactgtaatggaagatggtctactgctgcggcttggcg

SEQ ID NO: 75003 - DNA, 210 bp, Oryza sativa
ctcgacccgggatcctaagcagcgcagttctttttttttcttgagctgggggactggaaaaggaacaaaggtcgtcactgctgaacaaaagccttccaagactcaccatattgccttcttgacgagttctattcatgcataaacttttttgacaatgacagagtccattattgattagagatgctgaacaactcgccttggaattgacac

SEQ ID NO: 75004 - DNA, 460 bp, Oryza sativa
  unsure (1)..(460): unsure at all n locations
ntcatcttgattaaacatagtgtgtactctgtcctaagttcattataattcttacgttcacagataaaatctgcaagcgcacagatataccactgtagcatttcactcggaaatattcaaggtatcgaaattttataggtaacatatatacaggcaaaacgatagatatgttcttctgatgtgtgacaaggtcggttagaaaactaaactttaatcctatcgctatccttcaggcactagcttgcttgcacagagatctctggagctgtcgccacctctacaccaacctctaacgtactgtgggatacgcagtanacaccgattacaataccagcaagctaaataggaactaactaagatgtataccacacaagataaatcttagttacttaatcgaaatactctctattagagcaaagtaattgctaaggtataaaagacatatagagatagcgacaat

SEQ ID NO: 75005 - DNA, 281 bp, Oryza sativa
cggtggatggatgggtgggatatttattgtggcgaaacggcgagttaccaaacgatgccgaaccgaaccaaatcgggggcgggtgcaacggtgaaacacgtcgatatcaatcagtagtggtactgttctcaaaaacaaatcagtagtggtacgtcgtatcattcggtagatgccctgaacgctactgtttggtttgtctcatcatctgatctcggatgattctgaggcccagcgtgccgattgtgcgcgagatacattagcatatgtgataccctggactg

SEQ ID NO: 75006 - DNA, 377 bp, Oryza sativa
accttgaaactcagcttatgcacggtagacaagcgttgaatgctctcacttaggtgtttaatagccccaagtaccgggttgaagtactcgttgggttgcattccaaaataagcatactgtggatggaagaaagcatttggatcatacccaggaggaggaggaggtgctgagcttgagctatctccatgatgagaggagggcgccaccctatgagcacggcgagctccaagctgaatgcggggcttgtactgcttgagcttcttcaaagcttgtcttgaatcaacctcatgatgtaaggggcataataaattccctgagtgaacgttctctcggagatggcaatctcttgcatcatgagagacacaatgtctaactga

SEQ ID NO: 75007 - DNA, 453 bp, Oryza sativa
  unsure (1)..(453): unsure at all n locations
agcttgcatgtcttgtctccaagaattgaatggactagcagggagtacaagtacctgctctggttcaattaatcaaatgatgtttcttccttgatttgtgagttgaactatgattaattatgagcagtagctagcatcaatgaaactaagcatatatgcccaccgtattagtatgtatgggtttgcattaatctgcgtactcaaactgttaatacagttcaaacacacctacacgctgatagctagctagtaccagtacctattgcatatgcnctccatttttcagtgtgggtttcaacgttctagtacatatatgaatctcactacatatctttcatatntntcttggttgtgagtactcaataatgggtttttggctgtccctagagatggtgcagaaataatctttagtactttcttccgacaggcttatgannattgccatcactagta

SEQ ID NO: 75008 - DNA, 444 bp, Oryza sativa
attacggacctataaaactaagctttatatttaataagaattatgaatttctttgtcttccttgtgtaaaaggcatttttatggaaaaagacggtcactaacggtcaactgatgggaggggtatgcaagggatcaaaataaatttgggggtatacaaggaagtaagcaaaattcaggggatagaatggattaggtaaaatttcagggatataagagatttctcttgtactggaggcatccgtgacaagtcaatggaggagaaacgatattaaacctgtcgtcctgtaaggttgagtaattttagtatttttggcatgcgctgaaattttggcagttgagtgcaaataaatacttcaacttacgttttatcttttaagataaactgaagtgaccatggaatacaatgcatgctggggagttacttttacaaagttgtcttttttg

SEQ ID NO: 75009 - DNA, 187 bp, Oryza sativa
ctggagcttgcaagaaagctacaacgagccctcttgcagatcaagtatcattccccatgattccaccgaccactctcaacgatttatgcttcttcgtctccggtggagatgttgtgtgctgttgtacgcttgcagcaccaagtttgggcatggcagtggaggctgctctccctccgctactcccgtc

SEQ ID NO: 75010 - DNA, 409 bp, Oryza sativa
acttagacactcagcctgggttcttggatcttgactcttcacaagtagtaatactatactattagctactactatcaattgtacggtactacattcgcatcgcgacgttactgtaagtgtgcagtaaagaccataaagtatgtagtaacaacgcgctttactgcaattcttgaatagtggtactgtattaacatgtggaaactatacactgcatgtagtaacaattccactttgtgcggttataattatatttagcatgtgagacttttaatctatagttttttgattccaagtctaccgcaatcccaccacaatgttactgccaaatgtgcagtgacgctctatatggtctacagtaaacaagcgctttactgcaaatactcgcatattggtactgcatatacatgct

SEQ ID NO: 75011 - DNA, 328 bp, Oryza sativa
  unsure (1)..(328): unsure at all n locations
agcttctatctctatgggcataattttctttctaaaatctcatataaataataaaataatggcctagtgttccatagttaattaccaattcttttatggtgtgcaacaaccgtactgtatcttttatatccaacagccaataacggaagaatgatttgatccctcgagaggatantcccctcgtgtttgcattntactcaaatggttatgaaaaaaaatgaaaataattgagaagatgtattaacatgtgatatatcactccaccaaccatgcaagaanaattcaacttctaaatctactacgaanaaacaaatttgactctgatact

SEQ ID NO: 75012 - DNA, 393 bp, Oryza sativa
  unsure (1)..(393): unsure at all n locations
ttcttactcacacctactcccaacttttccgtcacatcgttccaatttcaaccaaacttccaattttgatgtgaactatacacgccctttatattattaggataggcctctttcttcaagactcaactttctattaaaaattaaaaatatcgntaatacaaatttctgtttaaaatttcacatctattcaaaaatcaaattaaaaaataaaatgttagcccaagtctctgcaggcccatccggcccagcacgtcccgacgactccacgcagaggaggaggaggaggaggaaggaaacccacgagggcacgaggccgtcgtacacccgccgccgatcacgtcgacggaggcggccggagcccactctggcaggccgtgcgatctcacatggcgc

SEQ ID NO: 75013 - DNA, 422 bp, Oryza sativa
tcgagacagtggcacttgaagttggatgggacaataaagatatttgtgtttcatgagaatgtcgaggacaactgtatctattcaaagttaagaatgggagatttattttcctaattctgtatgtggatgacattctactggctagtagtgaggtcagtctactgcaggaaacaaagaaattcttgtcctcacactttgacatgaaagacctcggtgaggcttcatatgttttgggcatagagattcaccgacatagaacaaagtatgcattgtgactttctcaaaagacatatatagaaaaggtgttgaagaaattcaacatgtacagatgcagtgctacacctgctcctataatgaagagcgaaaagtattgggcatcgcaatgtcccagaaatcagtatgagctcaatgaaatgaaaaca

SEQ ID NO: 75014 - DNA, 459 bp, Oryza sativa
  unsure (1)..(459): unsure at all n locations
tattgcaaccaagacttttagaggcaagcagtccttctatgtcatatnggattctactggtaattaattactgaagccacacagtcagtcggactggagagctcgatgtggtctccgccagtataaccacccgaaccctccacgcacacagagcacacagaccttcgtcttccatggcgcgcgcagtgagctaggtggccaaacgaaagcgtcacatcgtcggctgcaaccaaaatctctccacttgtgcgcttgtttaatttactcgcttcacatgggggcaccgcaaaacggtatgcccatgccggccggccaaggtccataataaacccaataggagcgacgccgatccattaaaaaagttcggtagccataggctctcaactgttgttacagntatgcattcgacggtcccccgggtgccccgccattgcataatccactccagccactcattca

SEQ ID NO: 75015 - DNA, 454 bp, Oryza sativa
ggacctatgaaactcagctcaaagacccatcctgtggccactgagactattctgtttatattacctgtgaacatatgaaacgaagaaaatagaggccatcgaatgacgagtcacttgtatgaagtgtttacagatcactgaaccgctgtcaattgtcactgtaaccaccttactggcgctaaccaacatatattttgactactccatccatttcatgttctagaagtctagatgaaggtacactcctatacaaatcttcatgcactcaaaaaaatgtatcacaattgtgaagtatgattcgaacacagctctaagtgggcgacagaaacatgtcattttaacatacctgacatgtgacgcgccacggatgacatggacattggtgactaagtgggcgcttttgtaccagacgaaccaacagccagacccctgcggtgcctcgagcacgtacagc

SEQ ID NO: 75016 - DNA, 410 bp, Oryza sativa
  unsure (1)..(410): unsure at all n locations
agcttttcatgctcttaaacaagctntaatcactgctcctgtcttagctatgcctgatttcaatgaaccttntgtggttgaaactgatgcttctaacaagggaattagggctgtntcgatgcaaaagaatcacccaattgccttcttaagtagagctttgggtactcgacatcaaggattatctacctatgaaaaggagagtttagcaatcatgctggcagtggaacattggcatccttatntgcaacatgctgagtttntcattcgtacagatcataggagtttatcttttctggatgatcaacggcttaccaccccatggcagcataaggctntaacaaaantgcttgggtttgcgttataaatcatctacatccacctcattctgttcttgaactttgtagctgttc

SEQ ID NO: 75017 - DNA, 417 bp, Oryza sativa
  unsure (1)..(417): unsure at all n locations
cgctactcgatcatggccagcaccaggagctcttcaccagcagcgctgggagcatcggccttggagatgcggcacctggaccagctactactgtggcgatgcggtcggagtcggagactggatgctgccgcatgtgtggtgacgcggcggccgcgctccatcggcagcagatggcgtggaggcggaagaatgtgtccggcgggaggcgtgccaggacgcgctccagcacgccgtcgtggaggtccccagcccacgcgtcggcgggctcctgcgctttctgctaattctcaccgccatggaggaggaagctctnttctttctgttacgatttggtttgggttggatctgaatccgttgttatatgtgtgttgatttacgattgtaccctcggtatatgtcagttctaccgataagaat

SEQ ID NO: 75018 - DNA, 428 bp, Oryza sativa
  unsure (1)..(428): unsure at all n locations
agctttctacatgagcggatctgcattccccatagattcacatgcgtatgactgggaggaagtggagtggcatatctaanaactgtttagctnttcttaacttatgtttgtaggctactttgtttcgttacacanaatgaaattaacaagaaggccagctcatgatatttcattgaacaatgaaatgatcagttcctcctaataaattatgccanaatgtntgttcataaatttgcaaataattctgctcagtatcaccatctcatgatctctctctattatagatctttccgccggaagaatggctgattgcatatctgtgccataaagtntctcagatgctttcgaaatattaatgactgactcaatatgtangangtntagacatcagccatatgctgtggtttctgttgttaggttatctagtt

SEQ ID NO: 75019 - DNA, 458 bp, Oryza sativa
  unsure (1)..(458): unsure at all n locations
tgtaatataatcgtataggcttcatcattcgttccctctccaggttgccatgaacaacaccatttcaatcacaaaatagaactcttctacctccaaaaagaacttgaactttcgtgagcaagatatccgcaaagtcgcaatctgcatcatcatctgcctgctgctgcttcatcgaaattttggattattagataggtcgtcaactagtgatcgatttaattgtggacaggggagccagggatcatgatatgatgtgaggtgatgaggtgacaaatgacaaaataattaaggagaggtgcttgcacggccggattctgataattaacttgataatattattgtcatagctgaatagctgaatagtgacagcttacccgtcggctctatcgaanactcgcanatctactggcaacaggtactggtcagttcacggtttatgccctattaattgcttgtac

SEQ ID NO: 75020 - DNA, 389 bp, Oryza sativa
  unsure (1)..(389): unsure at all n locations
agcttgatagcacccaccaggagtagcacacctagagggagcagttcaatccaatctatagtggcatgatataatgaggaataaagacaggcacactctgaaaaacgggcagtcaatctcacatcagcaagtttctcaggccgtccattgagccctccctctttgcactgacgctcacaaagccaccatccaaggagatctctatcaatgtgatgcaacgagccagtgattgcgagagcgccaacacaacaaaatactgcatganaatatatatccatgacattcaggttgtctgacaactatgaagtgatagcactcataanataaaatgggtntagggcaaccttggcaggaaatgcannattcagatcattatangaataactaaa

SEQ ID NO: 75021 - DNA, 436 bp, Oryza sativa
  unsure (1)..(436): unsure at all n locations
tttttagttgaacatgagtattaagaaaatatgtgaaaataattagagaaatgttctgattggttgagaagagaaaataattgaaaaaaataaataaagaatggttaagattggttgagatgagttggtaggtgatgaaaaagcttcattttgagacaaactattattcttcactttagggtggaggaggtatagatgttcaaaagttnttccatttgctccagtagtatagctcgtgcttggcaatgtgaaggctaatggatggactagttttatccccttcctttgttcatgaaagagcggaggggcttttacggttgctgcaacgtcaatgagaggacatggaggcgaaagggcggcctagctccgcatccactgatgtntgaagtgatgaggaaagacttctagttgttaagttttctagtattctaagata

SEQ ID NO: 75022 - DNA, 309 bp, Oryza sativa
ctcgcccggtcttaagcaccgagcttcactattttttaaaataaccctccccatccaacccttttacacctcttctaacataagcccctttaaaaagaagagttttaacatgtttaccattattattttaattatactaataattatctattaacttattactgtaaaaaagagtctacataacaccagcaacagtactatttcataaaatcaacataccatgatgtactttacagatctttaatattattaattacaaatttttacaactcatcatactatttttctccgaaattttactttccgagg

SEQ ID NO: 75023 - DNA, 455 bp, Oryza sativa
  unsure (1)..(455): unsure at all n locations
taccgganaggaaaccaacagacgtgctctccatatgtctcccatcagatgctcatatatatggagagagggagagacaaagacagcatcgagcacgcgcatggagggagcccggccgcctcgccggccctactgtggcggcgactgccagcggcggaagaagcgaaggggagggaggcggcggaaccgcgcggaagcgggagaggggcgacgccgatgcgcgcgcgggactctcggatcagatcttcggcgggcaggggccaagcttctgaatattttggaccgtgggatgcgagatggacggctcatatccaacaatctaaggaattcattatatgggagggtctttcttatttctctaatctataatatataatctatcttaattgtggcagtaataatgcagaccgtcaatctcaagaaagaagaaatacactgcgtaatactttactatg

SEQ ID NO: 75024 - DNA, 423 bp, Oryza sativa
  unsure (1)..(423): unsure at all n locations
ntattcaatactgttgcatctaaagcattacagggtttctttctctatattcgcagccttctgcaagtaaacctagctgtacacagatattaccatttcatgcattcattgttggttaatataatagcttgctgagtacgttgtactaacccttgcttcaacccctttttcagagttaatttggagtcttgccgaagccgggagttcgatcatataagttagtctcattctaacttaattctcaaatatagattagatagatagtttaagtctatagcaaaacactagagttgagtcatcggatagcttctgctgtaataattagccacaagtttgtaaataccctatcattttatgtaaaggactctcctttaaaaccctgatcanatgtatgcaatgaagatatgtgcatatactagtact

SEQ ID NO: 75025 - DNA, 281 bp, Oryza sativa
  unsure (1)..(281): unsure at all n locations
actcgagttcctagtaactcgattgtaaaaataggaggataaaaatcacaggaaaataatataattactacaaatttaacttaaagtgtgacaacactatatttcacacaagagagttaattaaatatgcttatctacaatctacaggtaccaattgctatgacaagcaattaacccttgaactaccacaggatttcacatcatgcaagacatggaacagccagccatacacatattctntntctccttcttttgtgcaagctttggcatcatgtactctc

SEQ ID NO: 75026 - DNA, 379 bp, Oryza sativa
  unsure (1)..(379): unsure at all n locations
ctgatattgatagattggtgcaagtaaatggtaatataacttatataagttttactaacacagaagtagaaaattagaaatagatggcatccaaaggtgaaatctgatcagcatctgatgttttcattgaatcttaatgcttgtactaccagagaaattattaacccagaaaactgagttcaactaatataaattttcactcaatcatagctaggcaccagcttgtattacgaagaacacactaatcaatcaatattctcacctcatggcggtatctgattccacccttcataggtcccctaacattgtcatgttaaacccttaacccaacattgtagatgctanagtccatcatctttcggaactgtgcattcaacct

SEQ ID NO: 75027 - DNA, 453 bp, Oryza sativa
  unsure (1)..(453): unsure at all n locations
tctcttacattgttntctntactctatatcgatgaatatgttggttattgatcatgatactaagtaaatactctctgtatttaatattacaagtcactttagatttattataaatcaaatatcttttaagtttgactaggtttgtagaaaagtatactaacatctaaaccactaaattagtttcattaaatttaacattgaatatttattatagcatttatattctgtgttaaaaatgttgctatatttctttgtaaatagatgtttcacttgggataaatctaaatagacttataatattaaatggatggagtagcttaattaatttctattatgaaaaagatagcgtctgtgatgatcccacttgtagaatcttagctgtccaagcaaaggaacattgattggaacagctaaagagcggacattagaagtgggaagccgcatccagtctta

SEQ ID NO: 75028 - DNA, 413 bp, Oryza sativa
  unsure (1)..(413): unsure at all n locations
tcttcaattctgcattctggttgatgaagcagcttttaagttacaaagttgcagtacatatctgacagggccagtttaagttgacttttcagctgtttccttctattagaggaaaagaanatgttttgatagctgctattgttattagcttggtgtctgcgccataaattccgtaataagaatatgggcttcttctgtaacagattatttacatatttcaggccccacttggaacgccgggaatttctttttttcagtccagttaaattcctattggttaaacgaggccttcagtatgcaatagaatttgctgttaggatccaacctttcacttccangggaaaaattataagcatatactgganacagangcattntaccactacatgtttattagaactgggtgttcatac

SEQ ID NO: 75029 - DNA, 418 bp, Oryza sativa
  unsure (1)..(418): unsure at all n locations
tatanaaactcaagcttcacaaaagggaggaatntctagccagaagctgctaacatcgactagtaattacaagcacaagtgagcaatcaatccagcacaaataacagctggattagcatcaaccaaaccacagccacaccctcggatccgtcccacataaaaagaaccaacctgagcacatgcacctcctcacaggtattgcatcgaacacgtggtgagcatgcatacgcgagtagcaaatctagaaccccgatgaggagcaagcggagcgcacagagaatgagagagagagagatccacacctgcgtggctcatgaggcggcggcggctggtgtggtgagtatcatctggagaggtaggagatcggggtggcgctgtttctttcttgcacctttatagccgncgtttcgcactcacg

SEQ ID NO: 75030 - DNA, 299 bp, Oryza sativa
  unsure (1)..(299): unsure at all n locations
agcttcacttgttcgcgcatncgcttncgcgaaggccctgcatcgtcgtcggctttgtggggatttgcccgaggaggcaattctcctttataaacccggttcgcccacccggccgattgtcgtgtagcagctggctatactcgacgaccgacacgtcaccgatcatcctgcgggcttcggtttcagcttggtcaagggtcaacacttgtaaagtagagtgtgaagctatgtcacaagtcagataaggcgaaataagaaagcatagcagtatatagcataagaacagtcttactgttcac

SEQ ID NO: 75031 - DNA, 370 bp, Oryza sativa
  unsure (1)..(370): unsure at all n locations
ttaatcnagctcgatgtaaacaggtcgcgctgatggaatttttttgctgcccgtgaatgctgaccccaatgtatatataagaccgggttaccgagtccctgagatgtcccaggtcgatgaagcgatcccgtgtgtcaaccgaggtgagggtcgacaacggactccactaagccgacactggttctcacatggaaaccacgctggctcctagcgggtacactaacacggactctacacagtcatcaccctgacacgtgaactactaccgatatcggttcacaggtacctgggtcgacgaccgtacaactggtactgggcgacacctgatagactatgacggggcagcgatggatagggatcctttccacct

SEQ ID NO: 75032 - DNA, 212 bp, Oryza sativa
  unsure (1)..(212): unsure at all n locations
actgaccagccaaacacaatcaactcaaccccatttcaacataaacattccaatactgctctgcaactagttgtgttgcagttctttctatatagttaatcagaacaaaaaaggaaaaattaanggaaaagataaatatgtaccttcgcaaaaatagagacaatctttggaagaatactggtgttatgacccatacgctccctatctgacct

SEQ ID NO: 75033 - DNA, 430 bp, Oryza sativa
taccttcgtagatgaaactatcctcctgttctggatttctctttggaagctttagcttctggtgagtggtggagctcatcgtagtactgctggagaacctacgtttcatccttcccagatatgctattaattgccctttattatctaatttcttcttctaccggatctttttggttgacaacacctgtttgtctcctattaaagctctatgcgtcgtgccggtacatgtcttctggaagagtgcctggaaattcagaacctgctggactaattgaatacaaacagggtgacgactttaatgagagctcaataacagatgagtctgaactcagattgggccaccttcaacaccagctcccaactaatgaacctggagcgctgatgcatcttgtacaagaatcttctgctgctgtagcagacgacgctgatg

SEQ ID NO: 75034 - DNA, 413 bp, Oryza sativa
  unsure (1)..(413): unsure at all n locations
tcactcgacccgggatcttaagcacctgaggatgaatctttttttgcaccactttacaaagtattatggataatattattggattgcaggcatggctattggctagatgcaataaaaaagcattgctcaactcgcaccattgcccatatatgtttacaaaacaaagttcaagcctaaatgcacttaggtaccaaatgacacctgtggagaacctgaaaaactatctgtatttgttgcttaagagactcgtcatggaattataagctaaatatcacaacgaaggacttcgtgtggcctgctcatattgangagtattatatataaagcacatananagagaaaaattcatcattgagtactcaggggatcatacatgactagtataatagaacactttctcgtctaaggcacta

SEQ ID NO: 75035 - DNA, 457 bp, Oryza sativa
  unsure (1)..(457): unsure at all n locations
cttanttttattacacagaggacctgtcttcttctctaacggaatagagacacaacagagccatggctgagctcgaactcaagctcaccgacggacaaacagttgcgcgaatggcggcgacatctagagagaacatgtacagcaagacattgtgattccattcctctactttacccaaatagaggtggctgaacccacgcaagcggtggctgcaagtggcagcaagttcctgacaccatgcatgcagcgttgcgacactggatggctcgatctattgcatgcatgtctagaacatcacatgcaagagaaacatacattaaggactttatcctactgctgagaagccacatttcagctcgacgtgaagggctaaaacctcaccacaacacggaagcaaagagaccgagctctgtcagtcaagtaaagaagaacagcttgcaatctgctcctaaccttg

SEQ ID NO: 75036 - DNA, 381 bp, Oryza sativa
  unsure (1)..(381): unsure at all n locations
atcttatatgntgtgtgccgatctgagtgaaaagcatctctggatcatgcgtngataagttgctcctgcgttctttaatccgaagggcatgatgaatgaagtctttaagcaatcggattcctttagtcggatctgatgatatcctgaatagcaatccaaaaagctcagtagctcgcagccggcggtagagtcaactacctggtcattgcaaggcaacttgaanggatctttgggacaagacttgttgaggtcggtgtaatcaacacacacacgccattgtcccgtttcttctgaccangactgngtagccagcagtcggatgaaggcttcttaatgaacctgctgtacagctggtcattcctctgatcgatctcctatctg

SEQ ID NO: 75037 - DNA, 408 bp, Oryza sativa
tataaggaagccaatcaactcagaacaagcaagataacttaatcaaagcgaagaacacatgctaatgtgcttagggccagatcatacagagtatcatcatgatgacacagcataggacatgagctattaaccttttctcatcacttttattagatgatgactctcctaaatgctttcagagaaagcacaattacaatggtccaccgaagcttatcattgagcaagagaaggatgtgtcatacactgccgtcaggcctcaaccaagtaatccagctaatgttcccattataggcagtcccaaagctatcttcggcactactcatgcgtaaaccgctcaggagcccggacaaagacatagataaaccttataaagcatgatgtaccaaggatgaataaacaagcatgagc

SEQ ID NO: 75038 - DNA, 389 bp, Oryza sativa
tgtgaggatcatagctctataagatgagatagctctcctgtttaacgagaacgctcaattgaatggtcttccatcgccacgaggagttcggatcctcaccacgccccgcaagtctacgactgctcccgtgcgcattcaacttgcaccctagaacccacctttgtcctcaacttctatcgcatcacccgtagcttcagctccagccccagctcctgtgccagtgttagctcccgcgttcgctctctccttctctccagcgtcatccgccatgggtccagccagtggcaacggaggttggatgcctactactcctattggcagccgcgaccatagcagcagcagttccagtggctcagatctgggcagcggtgagacgtatctgccatact

SEQ ID NO: 75039 - DNA, 165 bp, Oryza sativa
tgacaacaacatcataatcagctagcatcaccgatgatgacacacatatacactgccactcgatccatctgctaataggttcacgacttgttcatgacacttaacaattatgtagtaacacgcatgcatattactactatgtgtataacgatgacacacatatac

SEQ ID NO: 75040 - DNA, 448 bp, Oryza sativa
  unsure (1)..(448): unsure at all n locations
tgctaggttaggaagttgggtgagaatggaggtgacactacaaccaacccgtttgatccatctcctccaagagaagacgatccactgccttttctaccgcaccacattgccattctccttaattttctccgagccaaatcaaattaaccggcaaaaaaagaagaagatggacatactaccaatagcttcgtcctccacgcgttcactgaacaaacaggacttgaaggtccaaattatcacatcggatattaaatgaaaccaagtactccctcctttgtaaatatattacaccgttaactttaaacacatatttatcattaatcttatttaaaangtttatataaatgtataagatatatataaatcatggttaaagtactttatgtgctaaaataactcacaacacaataaactataaggatgtaatgtgttattaaacgaatgatca

SEQ ID NO: 75041 - DNA, 114 bp, Oryza sativa
ttcacccagcatttaatcctcagctgtaatgaatgtgtatagacgacttacttctgtcacaagttcagttattctcttaattatagtatacaaaacgttcggaatttagttaca

SEQ ID NO: 75042 - DNA, 377 bp, Oryza sativa
  unsure (1)..(377): unsure at all n locations
ttcgttgcctggatatggccagtaagccgttcttgctttatcaataactcctagcatagacatgntgaagacgcctggtggtaccggtccggtgagacgattgacctgcaagtcaaggaattgaagcaaggtggtattgatccagaaaggctgttgttggcaatgttgaggtaagataacaaaggggtgttgttgaacagactgtttgggatcgacccagtgaggccattgttccgaatgttgatgctgcgaaagctgtgcatgccttgcagatcggctgggatttgtccatagagctggttaaccgcgagacgaagaacgccaagccttgtgaggttgcctatggaggctgggatgacacctgagaaagcattatt

SEQ ID NO: 75043 - DNA, 320 bp, Oryza sativa
  unsure (1)..(320): unsure at all n locations
gtagcattaacagtctcatttatggaacttgctacgagcttttgaaccagaagagcaatatcatcaccacttacctcgttgacggtgacgtttggtgtagaaccgggcttacgaacaattccttgacgagtcttgatgaagcaacccgccaaaagtgcttcttgtgtcgcctttagatgttgttcaatctcccgaggttgctcctcatccaaatcctccaatgagatggngaggatattggtaggatctatctccggcttggcataatgtagatgaagacgtcccaagcggagtggcaaaaatcatgttgcaactttttt

SEQ ID NO: 75044 - DNA, 436 bp, Oryza sativa
  unsure (1)..(436): unsure at all n locations
tgccgctgctcccctcanactggtaataacttgtcccatttctgcatccgttaatgatttaagaaccgttcgttgagacctcaaaagataagaaaactgttcctttttgtcttgcctcgataaaacaatgaatgggtaaagccgaattgatctgaccaaccaaacatgggatcttgtttgatactcaacacatgagaatctatgaggatactgattggcgctcaagaatggcgtagttaatgttatgatttgccagcattctcagctccccttcctttcttctctacacttatccgaataggtttgtgtgccagcttcttctcctgcaatcttcaggaaagaatccatcagcgagaaaatcaaatcgtattctatagaatatggtagtggtaattatataactgctctgaagaggaagagggagatgtcaataact

SEQ ID NO: 75045 - DNA, 344 bp, Oryza sativa
  unsure (1)..(344): unsure at all n locations
tgcttcataggaacctcanggaggagatcaccttcttgaaatccgagctggagagcatggaggctgcactcctcaagggttctgaggcgccgatcgaccaaccgcctgaccgccaagtcaagatctgggctatggacgtcagggatctgtcgtatgacatcgaggacagcgtcgacgagttcatggtgtgtatcgacagccgtacgccgaacaactcgtgtagcttcgggggctttgtttacagaagcatgngattgctgaacagagccaagtttcgccacaagatcggcacggacatcanagggatcaagagccgcatcaaggaggtgaatgatcggcatgat

SEQ ID NO: 75046 - DNA, 451 bp, Oryza sativa
taagaaacttggttctcagctcatagatatggaggccgtctctctgtgccttctgtatatcatgcacaagttcataatgaggcgggtcaagccggtgacaccattggtagtatccatgtgcgcgtgctgtgggatcagacagttgagttctgcgcacctcaaggaactgtatgaatttctccagaagcttacacctatccttgcagattatgtacatcagaaggctcagaatggtgaacaagagagccagcaggattcgcttgctgtgactacctggttgaaagagacaggcaccttgtcttttgattatgggaagattgtgtcaagaaacactgatggttctagcaacccagatgaaattgttgatggtctattccacgaatctttgcttgaggatcccttggtatcatggggtggtgtgtggcaagatgtcttgatcttggacctgata

SEQ ID NO: 75047 - DNA, 374 bp, Oryza sativa
  unsure (1)..(374): unsure at all n locations
agcttctgactgcaaattcttcatccgcatgtcttcccctctaagggtgtcatggtaagactgcggcgttaacatgtctggctttatagaccagtacggtaaggaaggcgccatgatttgtgtgttcaagctcagagatagcccttggctttgcattgatggaacacttgatgagttgtgattattcagaacaccaaactcaagctgtgaaccagtgtgggcatcatcatggatgagctcagagccactaccttgtgctccatccatcatatgcatcaacatctcattnttcatatctntgacatggctganagaagcgtgaccctggtgcgaagaaagcatgtcggactcccttgaagaggggtcttgtgaca

SEQ ID NO: 75048 - DNA, 453 bp, Oryza sativa
tcttctcgtgagtcatttggaacctaatcactaattaattatactcttaatgtttgaatcactgatgaaatctgagtactaattgaacaccatgcggcaagttgttcaatttgagttcagaacaatttgatggatttttccatatggagtaattaggtaatccagatagaattgcttccaaatggcgggtaatcatactgagaactttaatcatcgagcacgtaatcatctgtgagaactgaagagaaaatatatatatatatatatatatatatatatatatatatatatatatcctcgggtctgccgctactttcatgctaattaacataaaaagtttcttttcagagatgttcaccagaagcacaatagaccttctgttatcataaattatagaacgcatgcatgctggagtgcttgatacatttccactcacacaagttataaaccaac

SEQ ID NO: 75049 - DNA, 383 bp, Oryza sativa
  unsure (1)..(383): unsure at all n locations
caattcagctcggacccgggatcctcttagtcacctgcngcatgcagcttgtatttttgcaatcgtgcctggattgaaccacaatcggccaccagactgtccagtgatgaccctagccgatgacatatgtcttcaaggattttcttgacatcttcatttagaggggctagagtattgcttgatgtttcttcttttgcttcctcatcaaagtaatccttgatgtcaaaagagaataaatcngctaagatctgcacgaggaaatttgaagacagctgattatcaagatgagttgttcagccgattcaagaattttatagacaagacttactgggatgacacgaagtggtggttgtacttcttcttcaacatggtgactcccctgc

SEQ ID NO: 75050 - DNA, 443 bp, Oryza sativa
tatgttgtatagatatcttacacgctatctctacttgttgtctattttatcgaacacaccgacctgggagatctgcttaactcctgtgcaggtccaaagattgttgagatgcgagcgtgccagttagtttgattctgcaactgacaagatatataaacagcagatcaatgagccgatcggctaacaagccgatggagtgattccagccgatgccgattccagccgatagccgatgccagctgatagcgatagggttctgagctatcggctatatgtacaatgtagataatgatatgaaggcaatcggctgatgataatataatatagcaatataatctagtccaatagaaaccaatcggctagcaatgatatagtagaacaagtattgatccgaatgttaaagcatacatcggctggatgtccgatgtcatataatccacaag

SEQ ID NO: 75051 - DNA, 406 bp, Oryza sativa
gcttgtgctgcagcattgttacaaaaaaagattatagtagctattaaacctacacatttgcataatggaagaccatatcaagggtcgcaaaagaaatatgtccacctcggcaatgcacaatatcagctttgctagtattctcttgatcattactccaagaaaattgaacaagaaaagaagcactggtagattactgtttgagcgaacgttgcatttgttaacggacaactcgtgaatgtgagccatgtcagggttgggaagttggtttgtgcacacatcttctccacaggacctttacagcgcctctggagctccaggtacctatccaggttgaagttctgctctgaatcagctcttctgccgtactcaaacagctctccatgaagctcggaagttgatccttgat

SEQ ID NO: 75052 - DNA, 415 bp, Oryza sativa
tccagaagctttcgtgcccgagcccttctggactttgcttgtttgttgtaagctgtgcgcgcgagagagagaggctgacaccgtgaggaggcggtgagagaatatgaggtgaaattatgaatgcgtgttagccgctgcgtgaaattttctactctttctatctttctttcttttttttttccaattttgtccctttcgctttcgaaacgctgggcggttaaaacaccgtgcccaccgtgaccttcacgcgattttttcttacacgtgggcccaccgcccgtgtgggcccggccgtaattgggcgataggtgggaggtgtgggggattatattacgcggtaagtctggaatattcggtggcgtctttgttcgtatagaggagacgtgtctggctttacgtgtctcatctttatggg

SEQ ID NO: 75053 - DNA, 459 bp, Oryza sativa
  unsure (1)..(459): unsure at all n locations
ggcacgtagacttcctagctcctcgagacaacattctccctatgtgtttagcgccggccatactccaccaacctaattcctcttaaatgcgactaatcatctggtgtacggtcgcctcctttgctctaaagattcttgcatttcgttccttccagatttcccaagcaatgagcaagaagagagttctgagtcctttctgttttgttgctttcgggtcgcatgttccttgtgtccaaaattaaacaattcctacgttgagtntaaacgggtggttacgtggcaatatggtcagccagataaataaaaaataatggaaaaaaaattgagctccatatgtcaatcagcagaatagacccacgtgaccccacctctntctctctctcctcttgccctctcagcacactgctcgagccgacgacagcgctcctcaaagtctagctgccccagacgcgaccacat

SEQ ID NO: 75054 - DNA, 462 bp, Oryza sativa
  unsure (1)..(462): unsure at all n locations
agcttagttctattatccccatcacagtacctttgggttaagaagggcaatccggactttgtccatatgtatataaaatacttgctgacaatgaagaaacctttagattcctaagcttatgtggttntgcaagataaactgtaagatgctgcggcctgtggataatgtgcacactgaaaagagagcacacaaattggattgcacagatgaaacttacataagcctgagtgtgtggatattccctatctctttcggtatgttaccagtcaagttgttccacatgagatccctctcaaaagaacaaaatatagcagttaggtaccaaaattttggaaatgtaacaaaagagaaggcttcacgagactaaatgcacaataagagtcaaccatgcaagaaacaattcctttatgtcccagttattatattatgtaagtntcttctttcttgtgagtcagaattatg

SEQ ID NO: 75055 - DNA, 469 bp, Oryza sativa
  unsure (1)..(469): unsure at all n locations
tggtgtaatcaaaggcaagttgagttggatcatttaaatatctaattctcagctcgtgcatgttaattattatgaaactaataggcatcttttggactactaaacaacccccagtggagcacaggagagcatgtaccatgacaattctgtcgacgtattatagttcttggttctatttttccctatttggattattgtgcttcttagaagttgctcccattcaagcatgtgattnttggatacacgacagcctcaaggcaaacaatacaatgtgatgcgagggtagctactgggaagatggacggcacaatttaataaactgcacatgaacaagatatctttttgttgaaacacacttcccattaaactatatatatgaatgcaaccagaaagccagctttccggatagacacaattattaagttccttaagccctcanacgggattaatcacatgcacttaactaata

SEQ ID NO: 75056 - DNA, 357 bp, Oryza sativa
ctcgacccggatcttaagtcactgaggatgaatcttttcgtgctaccgcgtgttgcagtactcatttgttgataccaaatatgccgtcttggagatcacgtgaacagatataggatgaaccttgatactagtaccaatgttggaccatatgaccaatactatatatgttacgtatacgttctgggtgaggaggacacacctcacacctataatgagcactacacactctgtctctctgaccttcttctgatgcgcctcattcagtgtgaggctacgaaatgactagagatgagtgtttcctatggaaactcatggtgacaaaataaatgatctttatgtcgtcgcggatccgtacat

SEQ ID NO: 75057 - DNA, 322 bp, Oryza sativa
  unsure (1)..(322): unsure at all n locations
actatacaaactcagctgatataatacgcctgttcagaagggagtattatttcttgctccgtcgacacggcaattatcatcgatcggagggaatagactaaatgacctcgctatatacatagcatcagtcagctgtgcgcatcagcacgttgcagtgtcacagctcggatcccacccgaagaccaggatgtagttgtttgaaactcngcgcaaaagctagcccactgaacgatcatgactaggaacgacaagacctgtcgactgactgactgtagctgaatgtgcccgatatattcagatcaatcggccacctaagcgacaa

SEQ ID NO: 75058 - DNA, 456 bp, Oryza sativa
acttcttcactgcaccatcgagcccgcgagcccattcttgtcctactgatggttgactaccactatcctcctgctactggttccccaccacattctttttcacgtgcccctgctaggtcccctccgcatccctctgcacgttcccttcctcgttcaagtactggtatggatcctcgaacccctctgcttaattcgagcactggctgcttcactccgcgatagtatcgaacaatatttgagtcatacggctggccaggcatctgacgatacatatatcatctgctaagttactgagacatttatgttgtaacaaccatagtcatgtatgctacgtgtcaatgtcgcatattataacgctacacaaccttacaagctaagcttaattacagatctggatatgagctaactcatgtgacgtatattatacaaccacagctagaagataattatatacta

SEQ ID NO: 75059 - DNA, 455 bp, Oryza sativa
gtcagctgcctattcgtagagtagtgtagccgagcttatctatatctcctccgaaagatctgaactgacacacataggtagtgcatacagttattactatagctgctctcttagttagccaattaacatgcaggatagtgtagttacttctattgaataacagcctttggtttaatatagcatccaagctggggcgtcatttgttatccctgagaggcatagagccatgaacaaacagtctgaaactgggcagtgttgtccctgaagatgctcatgcgtggtgctagctaaagcgtttagctagcttcaccctgtagcatacatagatgtgcaccagtgtgtcatggttgcacgtttagcttgcagatcttatgtcacaagcgtagtgatatacatgcatgtttttgggcctcctgcctagctcacatcgtcacagagagagagagtactgacta

SEQ ID NO: 75060 - DNA, 409 bp, Oryza sativa
  unsure (1)..(409): unsure at all n locations
tcaaatagattaaaatacttgtaaaataatgtgcatggaaaaagagctaaatattaaggatgatctcataatanatacacatagctaattgatttaatttaaaataaaataattagtaaacatatccttccaaaaacaggtgcaagagaggataaaggagcatgcagcactggagatggtagatggtgcanataataataagatattgtaaatgtagtttaaaacacaaatgtaaagtttacaatanactgtttanttacatgccaaaataaattggcatctgctagtgtntaactagattcttctgctatcttgtctcttgaacattaaacataatcaagcaatganaaataataagaacggtatatgactatatagtataatgtctgccctatatattaaatttata

SEQ ID NO: 75061 - DNA, 340 bp, Oryza sativa
aactcgctgagcgaagtttgcgcttgtgataatgccagtgtcggcaagcccatcttggcatatgtcccgacgaagatgacatcagctaagctgcccccgtccatcaagatactccggacttctaaaccgggcatctccaccaataccaccaatgggtccttggtgtgggaaaaggactccttcagcatcctccagtccaaaagatatctgctgcgccaagtatattgggaccccttcgcctgccgaaataatgttgtgcactgctcgaagtagcatctttttctgtcgtttcgacacttgcgagtggggataagatcttgtgataacccagatcactctt

SEQ ID NO: 75062 - DNA, 331 bp, Oryza sativa
  unsure (1)..(331): unsure at all n locations
tacagaactccttgagctgttaaggatctggtgccagatgggaacaatttacctcacacgacatatgaagcgaagcaagtattatgtccgttgggcctggatgtcaaaagaattcatgcatgtccgaacgactggattttgtattacaaggaatacgctgacttggatgtctgccctatctgtgggggatcaagataccaacgagcaaagagtgaatgtgaatgaagtaagtccaagaggggaggcccagcaaaggtggtgtggtatctcccaattgcngagcgcatgaagagaatgtntgcgaacaaggaacaagctaagcttgtgcgct

SEQ ID NO: 75063 - DNA, 301 bp, Oryza sativa
  unsure (1)..(301): unsure at all n locations
agcttctgctacaactataacaccaagttctactgccatcttcataaatcaagaggtggtacatcaatcttcgtcaagcacanatcaaagatttagagttcttcactatgacatacgtcgaccctccacgtcgcacgttccgccgtcaggatcacacatcaatgaatccaatctacaagtttgtgttgagtggtgatccacattcatttgcacttaatanaggccagcttctgccatagtggagcggaggcccgtcgccggtaggcttgtgccggagcgtagcggatatagtgaagatatt

SEQ ID NO: 75064 - DNA, 419 bp, Oryza sativa
  unsure (1)..(419): unsure at all n locations
acactctaaatactctancttaatcattcgtcttattcagaaattgtatgcaactatcttattagttaagtcctgattcaggaacattcgaaataacattcaatgatgaatctagacataatataatatttaataattacgtaaatttttttataagacgaatgatcaaacgtatttaaccgcattatatattacaaaagaaacggggatagtaccattctataagggcctatttgattggattaaatattatactccttgattctactcacaataattaagccggtggtacacaactatatattggtgcttgagatagagagagggagagagatatatacattccaccacaaaagttttcgcgaataaaaaaaagaaaattgatgctagctataacttgtttcagcatcaaagaatac

SEQ ID NO: 75065 - DNA, 413 bp, Oryza sativa
acggaccttagatatcagctctatgaaattgctcgttgtagccccattgctctagaatataatacgtactatgacctacatacatttacatcggttgatgatcgaacaaagagtgtgctgcaaagagcctctttctcattgggagcttgcatcaatgctcttgtgcattgtcgacctgttctatgcatagatggaacttttatgacaggtaaataccgaagccagatattgatagcaattgggtgcgatgggaacaaccagggtctacctatggcttttgctttttagagagtgagaacactgaaagctggtactggttcctagagagagtgcacatcgcattggtgcgtatgatgccccacgttagccttatacatgatcgtcatgcggttatgttgcggctattagactac

SEQ ID NO: 75066 - DNA, 222 bp, Oryza sativa
  unsure (1)..(222): unsure at all n locations
ccactcttctagcaaccaatttatcttactggccgattaatgatntcacaaaatccttcatgtacctactctctagcaactttagttgatcattatctaagtaatactccatctatttttttgcgatataatatttgagcactttaccgcgaatcttccgatcaacttaagtgaggatctttcaaactctaatcaaggaattctcaagctatttctactcat

SEQ ID NO: 75067 - DNA, 407 bp, Oryza sativa
  unsure (1)..(407): unsure at all n locations
agagactctataagtactcagcttattgataatttgccatcatacactagctgacgagacgagttcggttcgtattttgggacttggattgaggattgagagattttggattttgggtatgctatagtatgtagtagattgtataggactggattgggaatatagtatctatattatcatatgtgctactagtcagtcttgttcttagtggtggtgatggatgagaagctcttggatgtgattcagatcatggaggatgaggttgaaatcatggtcgtgggcatctatgacgtgttcttcngaagagtcttgtcttgtgttagatatctctgatcacggtcgcaatggccatacttgacgtagcgatgatgggttgtccttgcttgctagcgaccatggtgatgctc

SEQ ID NO: 75068 - DNA, 183 bp, Oryza sativa
  unsure (1)..(183): unsure at all n locations
aaaatccatttcaaaaaaaatgtcgccgtaactaacagaaaaaaactctctccgccgatacagctaatgatcatgnactactactcgacctttaggtgagatgaaatcctgctgacaactaggggacaaaaaacagcactagcgtgctaaccgtgacctaggtcgttctctctgatgaattca

SEQ ID NO: 75069 - DNA, 316 bp, Oryza sativa
agcttcattttgtttggtggctcctccacctccttgacaggctccaccacctttgccttctcctcctcctccacagacgacgacgacgccttggcggccgccttccgtcccttcttcttgcgcggcttctgcttcagcgcggcggccaccacctcctccggcgatggcatggcctccttgtcgtacatcacgatccccttctcgtacatggccttcttgacacggtcacccacgtcgatcgcggtgaggttggtgggctcgacggcgagcactctggcgacgtcgcggtaggcgacgtctagcctgtcgagcgcct

SEQ ID NO: 75070 - DNA, 393 bp, Oryza sativa
agcttccgctgttctattatttatttggccggtcggctggtgtaactaaagtagatgtagtttataatcgctttcatcttatttatgtttgctatgtataaccatgcttttgatgaaagtgtgaatctagtgcacatcgaactagattcacatgagtatgagttaagaatatttgagatgttacagatctttagccatttttgtcaagtctcctgaatatttaacacatatggtcgccgctttcgagtggtttgacgggcacatctcaggctgaagttgactggcaggctaaaggcccagcaatgtctacaatattcctctctcgaggcatcggatatttcattatgcttgttcgatgacttgaattattcacttcatctctcaattataatg

SEQ ID NO: 75071 - DNA, 440 bp, Oryza sativa
  unsure (1)..(440): unsure at all n locations
cttatatatatagacgtcgatctgacgacgtacngtcgctcgtttcgaccgtgggctgaggccgtatgcgagcgcttatagtgggcatagatgcttccaatgctattgctaggtgaagtgttctacgtgcgcacgagttcgcattgatgcgcgtcgtcctactcgttcggtgaaaaagattatcgagtttggcgcggacgtcactggtgaactcgcttacgtgagccggtggtggttgtttcgcgggtcaatgtgcctccctgtcactgggattataatgcacgggaaaaatacttctccatccgtaatatgtgacgccgttgattttttcacatgattgagcgcacattttattgaatttcatattaattccatcttctatcctctgaatcattcgtagacacatttttatgtatacatatctttttacatatttaaag

SEQ ID NO: 75072 - DNA, 388 bp, Oryza sativa
  unsure (1)..(388): unsure at all n locations
tcactcgacccggatctctaaagcacctgcggcatgcaagcttgtttcttttattgcttttctgggttcttttcttcttgctttggtggaaagagaagttttttttagcacttganacagcaaaattatgtttagtttgacagggatagagatgcaagatgcaatctattatattattaagacagctcgaaaaggaggcaccacgctcgctgtggaggctagaaattcccacgttaatcggagagaaagaaaaaaagataaggagagtccaagtaggaatacaatctataaatagctgaaattcagaattaaaaataagcaatattgaaagaagtttccatataagaactcaatacgagaataatcaaaattcgacatagaaataaat

SEQ ID NO: 75073 - DNA, 418 bp, Oryza sativa
cgcaggagattggagagagctacttcagcgagctcatcaatcgaagcttgatccacccgatgagtgtctattatctgttggatgatggtaaggtgcatcaatgcaaagtacatgacatggtgcttgagctaataaatcagctgtcagtagaagaagaatttgttacaacgtatttatcagatggtcaacaaacaggtaaacatacatgtacagcacataagaagaagattcgccgattatctctccataacagcaataagtcctatgcctcaccagaagcaagagaacaattgtccaaagtaaggtccattactatcttcggcaaggtcgactcgataccacccttgtcgagctttcatgtcctgcgtgtgttgcagctcgaggactgcagtggaatggacaagaaccatcttaatca

SEQ ID NO: 75074 - DNA, 449 bp, Oryza sativa
  unsure (1)..(449): unsure at all n locations
atcttgtgaatacctaaatagacagaggaatgcanaatgcacgagcattacacttggactagaaggaatcaaggaaatctacagaatcagggcatcaaagctagataatgctttgcgacttcgttcttttcatgtgcctagaagcccagaacaggagagagttcttcagtgtcatggacatggccaaataaatgtcatgataaacaagaatactgccatctncgttattgaaattactgcttcatttgtcggaatttctttgaattattcttatagtacagaatgatgaggaactcggctgcagnttactcangaagtatggagaagttcctaatacaaaagatagaaaaatcgacacagatagcagctactactattaccttangaattngactaaagtagtttgattaaattgaattttcgtcctgatgtatgctgatgatcacaat

SEQ ID NO: 75075 - DNA, 452 bp, Oryza sativa
tcttgcgggttcttgcacggttgtgctgcaagagcatgtttaataattccatgctatgtgaaggaaagcagaagaaccctgaggggtatgaagataaggaatcaacggtgataccattcatgctgtgatgtttcttgagaagtaaatagaccacacatgttttcctagttctgtatgcagttgtacaggataatcgatcgatcgaacgaacgaaccatcccctacgcgatctatgtctacgggcgagcactcagtccatccttcccttgatcactctctcctgaacctctgtgggagtcctgcattaaccaacaagccacgaaaacaaatttcacagattcagtaaagacaacgacagcattagagttttcatctaaactcccatgtttagtgtgagtgaaaaatgatcatatatggaacttacacaaggagaacatatccaccccagtcac

SEQ ID NO: 75076 - DNA, 396 bp, Oryza sativa
tgctggggagacgattacacgtaatgcaccttctcattcccttgatccctggcaagaccatccatcttccacagccaatgtgtcagactataaacctgctgaaccatacaaccatcatataaattcctataacagattattctcaacttaatactaaaccgtggacataaactccaattctacacccaacaattctaaccggatagatgctaacctctttcccctcgacaaagactaaaatcaatcaccattgaagctcaatattttggggagggagaaaaacgcgtgcacaacagcaagaaaacatcgtgtagaagactcagctttctcgagtcctacagaagatagattgccccggaagccgattctgagagttatggcagatggagtcggaat

SEQ ID NO: 75077 - DNA, 366 bp, Oryza sativa
  unsure (1)..(366): unsure at all n locations
cacttttcttctacttacacgcacacagtccttaatattacacacacactcacgctcacgcttcactacaacgcactggacaccagtgattattagctagttgggtttctggccagccgccggcgagatgggcaaggacaagcaccaccgcgactggatcctcccgcggtgctgcggtccaatcgcggctgcatactcacgctcgccagtctcgtcggcttcatcgtgctcgtcatctacctcgcgattcacccctccaagccttctttctacctncaggacgtgcagcttcgcaacatcgacctctccgaccctgcatctcctcacactcaggttataaaatctggctaacattgacagtttgtc

SEQ ID NO: 75078 - DNA, 170 bp, Oryza sativa
taactagcatatgttaagtcctcttactgtgtcttctgatgttaagcacctaagcaaaccattcttcagtacatatatatatatgtatatatatatatatataggagatgtatagtgatagctatatatagatgaatatgtatcaccgcgatgatacgattatgcagatc

SEQ ID NO: 75079 - DNA, 361 bp, Oryza sativa
ctggctgaatttgagccatgtattcgagagtccgccgactctattgttatgttggaaacaactgatcatagagccgagaattatagcttcttgtcgccgagaaatcatctgctcgatcgaatagtatgtgttgaatacgtccacgcatcaaatcctcgaatatctggagagccacctgttgtatgaaaataactaggcatcatatttggcgacgcatgccgagatgtgcaaactctcgtagtcatcatggctggtgaagtagcatagcctgcgaagcataggcaatagagtttgccggtgccgaatacaatgaagatgaaggagcttcaccatggtgacaaagacgtatagtcatgatgac

SEQ ID NO: 75080 - DNA, 420 bp, Oryza sativa
  unsure (1)..(420): unsure at all n locations
agcttctgtttatcttcctacagctaaattcaactccactgcgggtacacgtgctcgccatcgaaacccattgatgacctactgttcacactcgatgatgcgcgtggaaactatgtggaagtggcaccttcaccatgccatggcctcaccctcctgtataatgctgttgcgccagcttactacgtcttcaatgcaactacacgggcaatcacacggttgccaccttaccaagatgtgattcatgccactgctggcgttgggtttgatgcccggacgaaagagatcaaggtggtgatgcttttcgagganatcgcatgagaccattctgtcagtgtgagatatcattcttggggtgaggaatgtgacattgaggcctacgctggtgagtactatcaagtctgagtttgctttctgtatccg

SEQ ID NO: 75081 - DNA, 481 bp, Oryza sativa
  unsure (1)..(481): unsure at all n locations
cggaccttagaaactcagctctttacaaagagtgcccagactgttcttctgaccaaccctctagtgnagcacacgtccttccgatgcgaattctgcaacattaccaatacgcggatgtatcagcaatctacttcccttataattctgagcaagagctcttgacatatcgatgattactgctggtgtccaaacatcgtccaacactatcaagatattcttctcttcaaggaatctcctaagaatctcctgaagattgattatgtcgatactgccaatattactctgagtattttcctcatgaaagagccggacgcttagcttgtttaagagctccattagcgaatatgtttgagagacagatacccatgcatgacacgcataatattcttgttcatgcttgtacaacatttgaagctagagctgatttaccaaggcctcccatgccatgaagaactactgtagagcatgccatcccatcttt

SEQ ID NO: 75082 - DNA, 454 bp, Oryza sativa
  unsure (1)..(454): unsure at all n locations
agcttggttttccccttagccgagagttggctactgatttgattctncagtcgctccctcccagctntgagccgttcataatgaatttcaacatgaacaacctgaacaggaccctggcagaattgcatgggatgctaaagactgccgaggaaagcattaagaataactccaaccatgtgatggttatgcataagcgcaagcccaacaacaagaagagtggtcaaaagagaaagctaaactctgatgagatcacgagtactagcaactctaagaccaaggttcataagacagggcccgctaatgatgcagagtgcttcttntacaacgagacaggtcattggaagagaaactgtaagaaatatctagagcagctcaagcagaagcagcatgatggaaagagtccacctcaggattaatgtatagaattatnctgcacttctctactgatctggat

SEQ ID NO: 75083 - DNA, 500 bp, Oryza sativa
acatataaatactcaacttgatagaaaccactcgtgtcaacagaatctgcatattatccaatggaagacgaaaccctacaaacctgtgttacctttgctcttccggaatcagtttaaccaactgcaatatggtaatgggtgtggattgcgtaccgtcgtagtcaaagccaatgctttcttgtaccataatctagaacttcactcaagattgttgcaggcttccttcatcaatgatcacacgtgcacgacggttgttgatgacgataaaaatctcaaacaaattatggcattgcaacctgtcatgctgctgtacctgcgcgctgagcacccgctgcacaatgatggtcctgtaatccgctgagtcatcacgaccaaaaacttcgccatgctcatcctcaacttcttcatcttccccctcttcctcttccacgtcggaagtggtgatgtagccatcttctgtagcaacatatgcccgttgactaaggcaatctttctacaca

SEQ ID NO: 75084 - DNA, 396 bp, Oryza sativa
  unsure (1)..(396): unsure at all n locations
agctttatatactcctgcttaacagaagatacatataagggtatgagaaacatgaanatttcagtcatgtgcatattactttgaaaaagaatatgtttcatcttggtttcttgaatggatntaatacctggtcatgagaatggttcagatttgttgccatatctgacacggatgcctgatcagagttatcaaatgaacgatctctattgaagctcttatagatagaattcccactgctgctgctactgaaccgtgtttctgaatngatcgagtgtgaacttgtcacgactgtatcatcatgcgtggagatctcactcccaccactgcctgaagggctagctctcctgttggataacttattcatgttngcacttgcttcgtcacgctgacatgaca

SEQ ID NO: 75085 - DNA, 367 bp, Oryza sativa
  unsure (1)..(367): unsure at all n locations
agcttatgaacatgcttggaattatgatggagctaccaaccctaacaaacctcaaccatcctcccatactaccttgaaagagtttcaaacctcaaaccaaaccccaaatagccaatgatgctccacctcatgacgagaaaacacatgttgtctatacaagtaaatggcgagggaagtgttttaaatgtcaggaaccttatgtccatggtcatggttgagtttgcaaggcaactaagatgatatatcttgtgacaatggaagatgacatttatgcgttgaagagatacaagagcctncttttaccacacctcctggcagtcctcaagccacttatggtaatacatctgcctaggaattaactctgcat

SEQ ID NO: 75086 - DNA, 244 bp, Oryza sativa
atacttggacaaaaggttttacacattgatttatcaatgcatgcagaaatctacactataatactgcccgtaggtggcatataaatatattcaaaatataatgcgaaaaaataattatattcatatctaaagactgtatacatgaccacatgaaatcaactatcaacccggatatgcacatgtgcaaagagagcttttatgttatctttgaaacacaacatgcatgtctacgtatatgacacac

SEQ ID NO: 75087 - DNA, 454 bp, Oryza sativa
tctttgctaacatgcgcagcacaaaatttgttctcagtcataccaaaatcctagattgaggctgattatactgaatagaacatgcctgatacaatcaatgatttggtgtgctttccacattatgaaaggagaaggaattatgcgggatatacaactggaaacaggtgcatgtttacatgttgaccagaatatagcaactgatacccttacttgaataattgaacagaatgctaaagaattaaacattataagatgcataaattgcagagcgtcacaaatccaaatcaattgccaattaaggatatcagtttttcagtactaaataccttgcagcaagtccaatacaaactgtggaaacatcaggtctgatatgcttcatcgtgtcgaatatggccatccctatacacaaaatgcaggttggagtgaaacaaatgttccaagagtgagatggatc

SEQ ID NO: 75088 - DNA, 280 bp, Oryza sativa
  unsure (1)..(280): unsure at all n locations
gcgctttttcgcgattattttctactttntcaaatctctatttcaacttttcagcggcgtatttctagctcaaaatagtactcgctccatcctagtagtattctaagtgtagttgtaagggtttatgtgacgttcattttatttaaaaactttataaaaaaattaaaaaataaatcacgtatagagtattatttatattctatcatctatagcaataaaaatattaattataaaaaaattaataaaacaggtaatcaagtgttgagggagtaatacagta

SEQ ID NO: 75089 - DNA, 358 bp, Oryza sativa
  unsure (1)..(358): unsure at all n locations
ntagaattagcgggctttaactctatagaaagcatagatttagaacccttaacccggcgcaagctatgaacacacagaagcgatacttaaaggagttttactggctcaagtgaaaatntttaccataatcgacactacacaacatttgtaacattagccatcatgattaattggtatcaaaacagtcaagttaatcaagaatttctgacgacaagcgtaattataaaatttaaaataaaaagtctaaattggtagcgtacctttggctccgatcgaaatcgaaagtcgataaaacaacctatctcgtgactcgtgagttgctgtaatcctctttggcctttggtatcgttggccgccg

SEQ ID NO: 75090 - DNA, 296 bp, Oryza sativa
  unsure (1)..(296): unsure at all n locations
tgcttgtctttcatcttaaggacgagcgagtgattctcgagagactagccttcgtctccggccgaactcacaaatggngggtctcacgactccccgctattgaggatcttccctctacagctggcgcgccatgtaagggcgagtgcgcattccgagaggaagacgctttctttcatcctaattatctggcgagagccgacgtcctcgtcaccgtcgtcatggttctgcaactcctccctgtcgcgaaccttcacggaaggaggatcccacctcgttccggtgattcggctctctct

SEQ ID NO: 75091 - DNA, 311 bp, Oryza sativa
gcagcagcctttttttgcagcgaagggaaaacgaaagaaaatgagggagagtgcgtggccgcaaccgaagcacgaggcccaaccaacccaaccaccagaaggaagaagaggaaacaaccctcacctggcgggcggccgccccctgcttgcatgccctatagagcccctcgacctcctccataataccaccccacctagcttaaggaccacagcccccaaaaaccgactccccacgaagaacaaaacaacacattgtacacccactcatgcacaacaaaacaaagaccaaacacaaccccaagaaacagcag

SEQ ID NO: 75092 - DNA, 416 bp, Oryza sativa
agcttcaccatttttacttcacgagttgatttcaacatcaccaaaagaaaaaaaaaagtctcatgtactagctttagatgttatcaaggatattggaatagtagccggaataaatcggtagtgtaaaatcaagggcatgggggagccaaaaatgataaggaataccttttgaagaaatagaacacgtcaaaagtttcattggctctgctcagagcctcagacatcatagcaagcacagcatcaatcgtcaccgagaaaacaggtgaccaaatatttctaaagcacaggcctctcatcatccacctccatcttatctccattgaactgcatggacttcaccaaccttcttatcacggtgctcctcctactctctactctcaaatacgaatccgatagtgccacagcaagtgatgatg

SEQ ID NO: 75093 - DNA, 432 bp, Oryza sativa
agcttccctaattatgtttctcacacgttcctccatattgtcaagcattggtagatttggtggtctaaaaagtggcggcggtggcacaatattgttatattgaccatatccagtgatgaaccctgagttcctctcgacattcaaggcagttgtttggtctattctttatgtgagttgatgataactataatttgggagaaacgttgacgatctgactacaaccgtacaagacattgcgttgcaccttatcgatcgatacacctctccatgggttgttgatcttgccggggcagatcaaccttattcctgcaagcaaatcgaataaacaagttagaacaagataaaagcaatctgatattgcaaaaaggaattgaatacaaatgataagttcgggttccgaagaacaagcagacagactgtctaaccgacacg

SEQ ID NO: 75094 - DNA, 99 bp, Oryza sativa
ttgatattgcttgaggtacacagcctggagagatgggtgtcaccagaacatccgggactagggcttgaatttctagcaaccttgctcggattgatccac

SEQ ID NO: 75095 - DNA, 421 bp, Oryza sativa
  unsure (1)..(421): unsure at all n locations
ngctttgattggttcatgttgtgctacatgactttaatatttcagttgaaatctctaatagacaccactacagataaatagaaatagatgctcataaagtcatcacataacaacagtagcatttttaagtttgggtcatgaattcaacagataaagacatcggcatatagcaactaaaaagtaacagtataacagaaatcattntttgtagattgaaacaataagaaaatgaaccttgaaccatcataaaaaggtaatcctgcatactaagtatttctatcaacataattttcaatttagtaggagacaaatagacaatttcaaccaactgagcatatgaaatcacactatattgacttcttttatgacatgccctctaatgattcagttggtttcagatgaacaaacccaaccatcagta

SEQ ID NO: 75096 - DNA, 185 bp, Oryza sativa
ccccttgaatgtgaatatcctactgctaaaacttaaaattgtggtccaaaatcgctcaacaggtcatctcctacgctcccgctctcatgaaaatcaaagcaactgccttgccatcatctactccgattaagggtagtagctcagcacaacatttacccgatgtggtcaactctccttttcatgaa

SEQ ID NO: 75097 - DNA, 374 bp, Oryza sativa
  unsure (1)..(374): unsure at all n locations
acagagtagcactgacctttgataccattggaaacccagtgtggtagtgtcccagtcatcttaaatatattcttgcaaacctgcttgagaggggaagaaagacgatgtagcaccaaagaatcaaatgatgtattgaagcaagaagcattagtatttaagtccatctaaagtaaactatctaacgccatgtttgtggagtgttgactgtacacatcatgcttgtcatgatttctccaaacgtgcctacacaccacaataatttcctccatactacagtagaacatctatagtattttattntactgtatcagcaatagggtgatacacgattctggaaaacacagtgctaggactacccaagtgcaatntataca

SEQ ID NO: 75098 - DNA, 422 bp, Oryza sativa
agcttcatgtgtatatcatgagccattcatcgatactgcaatgctgcaagcttgtaaggaagctggaagtgtaaaacttgggccagccagagatactgtaatttcccaacttaatgagcaaaataaggctgtaaagcaggagccagctggtgacattgtagtgccacaacctgacgtgcacgctaaggtcgttaaggagtagacaccgagaacggaaactaatggggaagctacgaacatgaaggagacaccaaagaactctgcaatatgttattctccagagacaaaggattttggaaatattacaacaatgggttcagatccttccacaactaatatgagcgaagaataagccgtggttgttgaatcaaaatgcaataacccttcaatgtcaatagtgtgttcacctgcagaggtgtgaa

SEQ ID NO: 75099 - DNA, 427 bp, Oryza sativa
agcttttatatttggaatatggcatttgtgaggggtatgcgtacatgatgtacatcacgtacaccggctgggctggagcatatgcaaccagtactatacaagtgtcatataatattcagacgtgcatacaagtgcatgtgcccatgtagtcaaggttgcaccattagtgataattaatcatcaattttattactaccatcgtttctgggatcaatattttaacacacctcatttctttttttattaaaaaaaatgtacaaaatatcatcacacagccacgtaggataaaaccactctggattatgtcgaggggggtaattcatatggtttgcatagatgggggtgaagaatgtccggttctatggttaaaggggtaattctgtcgaccgcgatagttcgagggggtaattcgtacttattcctatat

SEQ ID NO: 75100 - DNA, 173 bp, Oryza sativa
atggcagccggttggcagcacggtggactcgtgagcctgcctaatttgtgggtggtgggctacgcttggtggctaaagggatgatgtggcggtccggcgtcatacgttgtgcgggtgggttgtgtggtttctgatgacacttgcgaaagcctttgcttggcctttggttgctt

SEQ ID NO: 75101 - DNA, 411 bp, Oryza sativa
  unsure (1)..(411): unsure at all n locations
agcttgaagaagatggatcgtcngcttgggtcgatgtaggtggctccacttgtgctgaggaagaggccccctgttgtggctccctatgacgtacgtccccaagagccaacctcttgattgctacgctcgggtcctcctcttcacctaacacatgtgagtcaacttgctctacttgagagccgttagtttcgtcaaatgtcacatcacgcgcgatcccaacaataccagaggttttattgaaaacgcggtatgcacattcatttgacccatacccaagcaagaacccctcatccactttatgagcanactctgaggatctagccttcttagtangaatgtagcacttactaccgaaaacacgaaagtaagagacatttggtttgttaccgataagaagctcatatggagtct

SEQ ID NO: 75102 - DNA, 239 bp, Oryza sativa
aactaagcttgttattacgttgtgggttagatgaatgcgaagaagcttattaattgatggttttatgtgggcttaacaaagaaattcatgacatgcttgattgtcaaagatatacatctctttctcttttggtacaacttgcttgcaatgctgaaagtaaaatagaaaaggatatgaaaaagaaacacgctatgtctttgcctccaattactaactatttgcatgaagtgcgtaatcac

SEQ ID NO: 75103 - DNA, 423 bp, Oryza sativa
  unsure (1)..(423): unsure at all n locations
agcttatctgattggtcgatcaggttcttcatgtcttcaacatgcatgcatgtgctgaaagattattcaacaacaaagggcgcaaggaattatatgagtgtaattttttttggaagcttgtgcttttgttcgtacaccatctgtcccaaaaatacatatggagtctatccacgattcaaggtatgaaccacctaggatattcttttcagcttgacagtttcttatcgaaattcacaaagcttcttatctaaaatgaaatttgatcgatccttcttcagctgcccggaaaagaaaaaaaaaacacgatgcatttttacttggcgatctccaattntataggaagagggtggcatctcaatccctaattcaattcgtacgaagaaagtgacccttgaacaaattgagatgctgattgaaagtaaa

SEQ ID NO: 75104 - DNA, 240 bp, Oryza sativa
  unsure (1)..(240): unsure at all n locations
actcagcttgcttatccataatggatctctttagacgacatcccatattttcgtttcctttcatgacaaaacctttcggttgcgccatgtatactttntcctccaaatctccatttagaaatgccgtttttacatccatctgatgtaattccaaatcataatgtgccactagtgccattataatcctgaaggaatctttacaagagactggagaaaatgtctcattgtatcaatcccttc

SEQ ID NO: 75105 - DNA, 326 bp, Oryza sativa
gagatgatgacaatgacaatgatgaaataccttatcagaatacagaaggacatcctctatggatagtttaagggcatgacattctccaaaagatgcaagatctatagctgcacgtggctctgcctgaaaatatttgaaagaattataaggtggtgcatgggctactgaaaattgtagatctcttaggctgtaagacttacttgtgaacctgtagtaacaactagaagatcatttggggcatacgcatgcatgtcctctaccttaacctgcagaacgactactatgaaataatgaggactacattccgtgatatcatcacacgtcat

SEQ ID NO: 75106 - DNA, 415 bp, Oryza sativa
  unsure (1)..(415): unsure at all n locations
agcttcagcttcatacaactgcaggtacatccaccatccgccttcaagacacattcctgcacggcttgcttgcgatagataccacgcctgctcctatcaacacacattatttcataccgatgcacttgtgtgccttgagcaacaactcgatgtctccgtacctttttgattntatcttccatgtactttgtcactacgttgccaaacactatgttgtcatcggccatggacggaccaattttcttgtatcgatccctaaagtacgcttgcgtgccgtgaaggatgaattcaacaatagcaaccaatggaagtacccgaactcctcgcattacccagttgtacacctcggcccaaatggttgtcattatgccataccgagatccatcggtgtcgaacaatagagaccacttctcct

SEQ ID NO: 75107 - DNA, 235 bp, Oryza sativa
  unsure (1)..(235): unsure at all n locations
ttctccagaagctgcaaagaagttcaaagaaatgattgactatgagtatcgagtgaacatgtatgctataaattttcaccttggtatttctaatcagctatctagccagctgatatattgtactatatgttcagcagatacattcaaaatacagcaactgaacttttttccctctaataacctntttttctcaagatattggataatctcccagtgtggtgcctaacaaacaatg

SEQ ID NO: 75108 - DNA, 437 bp, Oryza sativa
  unsure (1)..(437): unsure at all n locations
agcttgggaaaaagatgccgcgtctaagggcgatggtgggcagtccagtgccaatggtgtgcacaaggcccagaacaagagcaaggggaaatacaaagctcagcagaccaccaacttcaagaagcagaagaagaacaacaacaatcctaatcaggatgagaggacttgctntgtgtgtggccaagttggtcatctggctaggaagtgtccacagcgcaaggggatgaaggcacctgcagggcagacttctaagtctgctaatgtgaccattggcaacattggagatggaagcgggtatggtaatttacctactgttttttcagttaatcaatctactaattggtgggttgatactggggccaatgtacatngttgtgctgacatctcattgttttcttcttatcaagtcgcacgggggttccaccgtctaatgggga

SEQ ID NO: 75109 - DNA, 214 bp, Oryza sativa
actcacatgtgaaggagtaggctgcgctcctgaattatgaccttaatgtcttaattaagtataaacctagtcaaatgcatcattggttatattgatatgaccagtaatttatgggacagcagtagcacacagtagttggacagcaaaatcacagtatatcagagcatccccctaatcgcggccactgccgccacatgttgcacacgcccgaaaa

SEQ ID NO: 75110 - DNA, 78 bp, Oryza sativa
aggcaaaacaaaaggagcgatttattccaaactcgaaacctctagaagagacagaagggaaaaccaagatcaaaaaac

SEQ ID NO: 75111 - DNA, 431 bp, Oryza sativa
  unsure (1)..(431): unsure at all n locations
agctttcatatgattggtgatcttagcgagtaagaaatagagcattaacatctcttgagagtgtactcattattcaggcccggcgaaaagaaagtgctcgccacaggccacagcgacatatgaatgaatacctgttgccgtcatttctttgccgacgaatcaaacattcatactacgaacaaagatatacagtgatagtaactaatcttggtaaaagttttataacaaatcataagtaaatactaagggagcgttagttacagaaagggaaaaaatatntgtcttgtaactattttaaaaaanatagtaactatttttttaaaaattctatagtaatgttgtttaaatcattacattaantgtatttttaagtctaaaataattactacttaattaatcatacaataatgactcatctcactttatgtatt

SEQ ID NO: 75112 - DNA, 180 bp, Oryza sativa
acctggtggacaattgcagccttcagatacttcattctgcgaatttcacattagcttttcacacgttaaagaattgggaggcacagattgacaacttgaggtaaaggtctacttactgagcaggcagatattgtcttgcctttctagtttctttccagcatccccatttttaatttcgcc

SEQ ID NO: 75113 - DNA, 411 bp, Oryza sativa
agcttcatatctgtatatgtttacatcatgggaccgacggactatgcttcattgtatcaatggcagatgaccagcctgaagctcctgtgggttcctgtcgcacgacaactttgtcgagatgggaagacaggcacttggttgaattcattctcttctttaaccatcattctgctcatttgccaggggattggactacatatcatcttgcaactatgctatgcttccaagccaagctgtgttaataggagcacaatagattgatgcacttgtagaaatatgcttgtacaatcatgcccttccatagtgaagattataactgtggttgtttcttatagtaggctgaaaatggctcaacatctaacgggctatgaatagtattctgattcctatacctaattatcatgcattagc

SEQ ID NO: 75114 - DNA, 195 bp, Oryza sativa
gttgttgattcagagttgctactatgctgcatatctcaaagatacacgtgcaaggtatatgtactatctcttagattaaataattgttggcacggtgtcttacccttacccctgaatcccacgagacacttgttctccttgccttgggccgttgaaagacatcactatcaattacatcactctattccctctttt

SEQ ID NO: 75115 - DNA, 152 bp, Oryza sativa
tctttaaatcacggtcacaaacggggtatccagctgatacatctgcggaatttgcaggaagggctgatgatacccggccgctttcgccacgtccacggcgcgccaggacttcagaacaatcaccgacacctggggggcaaagttgcccgtcg

SEQ ID NO: 75116 - DNA, 423 bp, Oryza sativa
  unsure (1)..(423): unsure at all n locations
agctnttacactgaattcgcgggggatccagcgacttttctagcgaacacggcgactgatcgaacctgccccgatcgggcgggtatggccgcagctgtaactgtgcacgtacggtacggcggccactgttgactgttgggctcccgcggaagatgctgcttctggtctgtagcgaaagcgaagtcacccggacaccggaagcgactggacggccggccggcgacgtcgtccgtgcagccaggtagttcgttgtactataatgaattatatttttagttaggttagaatttttggggatggagggagtagctgcgccatccggtccagttttctgtagagaacttgacatatagctgtagctagtagtagcatccagccactcaatcctttgcaacgacagatcgaccgatgctatagctagta

SEQ ID NO: 75117 - DNA, 425 bp, Oryza sativa
  unsure (1)..(425): unsure at all n locations
agcttgtgcggtggtggagcatcggtgcgccagccgtgcctttgttggtctagtggcggtcggccacgcttatcggcggccgatccggtactagtcttctcctgngcgtgtgtgttggcgatgtcgtcgtgtgggtggtggtatttttttcttttcctggttacgactctccatggttgtaatcttgtacttttttcctgctctatcaatagaacttcgcaccgtctcgtgcgagtcgttaaaaaaaaagagttggtattcatgataggatatatcaatcattccagcgttagttataagagattaagagtgcggcgaanaattaattactatatgacatagcagcactgctctttatttcatagnactatatatatatatatatatatatatattattactgcagcacaagccacacactgatg

SEQ ID NO: 75118 - DNA, 199 bp, Oryza sativa
accatgaaaatccatcaattacaaacttaagtcagggataagggctcacactccaaaggatatccaccggacatacccacaagatgtcactcactcctattggacatgcccacttctctcttggtttaggacttgagaaaactcatcacacttggttagaccagcccacaaaatgcacctacatgcatatgaactaata

SEQ ID NO: 75119 - DNA, 411 bp, Oryza sativa
  unsure (1)..(411): unsure at all n locations
ttctttgtgtctatcaaaaatcatgtgttncattgtctggtgtgtatactctctttgtctcgtgaaaaaaaaatccagacttattgcactgaaaaaaaaaattcctgcttggaataggacgatcgatcagttcctctgactttttatttttatttttctgaagcagatggatgccagagagtatttttgtaccggatgcatgtttgtacatcagtacatgtctctgacattataccgtgctgggtgtgtacgtacgactacgtttactacatctcgcgcacaatttcagaatcagagtagaagtacaccaaaaagtaccagcacgttcaactccatagtacaaaaacaccccagaaaaccactttataaacataccaataaaggctaaaagatgaaggttagtcatgtata

SEQ ID NO: 75120 - DNA, 231 bp, Oryza sativa
  unsure (1)..(231): unsure at all n locations
tcttgttgcacatgaaaggcatggaatattttcttctttgtgtggctcacctgagcatggtctgtaattccaattgtggccacagagccatcattcttgacccactcatgagaggagctgtacttcaacccatcaagaactgccataccagcatgaaatcatcaccatggcttanatcaacagggaccatagtttacaacaatatactcaactcttttcaacaactgtaat

SEQ ID NO: 75121 - DNA, 297 bp, Oryza sativa
taataatgattctgatacctacacctaagaaaaccaatgatcaaaggggagtatttacaatgcctgacctggctataaataaacttcgccaaaggttggcatccaagaatatgaatgttctcttgcttgctttccaagagctcaataagaacattcaccaggctaatggcaaaatatgccctatatcatcacatgcacacaataacaagaaataagaactcttcctgtcaaataacagttcgatatatgaaaccctaaggtcagccaataaatttgcacactcacatttgctccttt

SEQ ID NO: 75122 - DNA, 242 bp, Oryza sativa
  unsure (1)..(242): unsure at all n locations
tggttcggtacagatgggaaaccctatagagctcatcatttacatgttgaaaagcttcagaataatcaagccccactgcataacctattgagttcatggcaaccttggcgatttccaactttntgcgaggatcaagtatcaaagcaaagtaataaaggtgaggtatagaggtgaagtatttgggaaaattttcttccatgggtttaacaatggaagacagaatacgatcagatcggttttca

SEQ ID NO: 75123 - DNA, 226 bp, Oryza sativa
tcaagcctgaacataccatattgacatatgccagaacattagtacctgtaagttgagaattacaattgcaagttatgcgttaaataatcattaagcaatgagtcaacgatgttatggtaaacgcatggatcagttgtcaaatataacagcttcatatgatatggccagtcaggccagacaatcttttatgtaaggatatcagtaacctcgtaggctgtaaataccc

SEQ ID NO: 75124 - DNA, 317 bp, Oryza sativa
  unsure (1)..(317): unsure at all n locations
caatttggctggtcccgggagccttagagctacctgctggctgcagcattgtactttattctcagggcgcttacttttacagtaactatgagtacacatgcgccatcatatttctcgagaatactggacacgccgacgatgggagagtacaagtaacacctataattggccttctcattaataaggacccgtcaagcaatcaacgacttggtcggcaaaaacaatacagagntcggtgcgtatttcatgcatcggaatgaagacaatgccagagtgggcagaatatggcatggaccatcaataacttctgaccaatg

SEQ ID NO: 75125 - DNA, 388 bp, Oryza sativa
agcttatgattattcatctatttgaagaaattgtttggaaaaaaaattcggtcgtttaatttggcatggctaactgtcaaaactaagcgtgaagtctagagattccctgcatagcccttgaatacctcgatttaattacaggacaaaacattgtacatatgccagcttgattcattaacaccaaaaattaacggcacaatatatccatttacagctcaatcgattcgatcaatccaactatacaaaaacagaatcaatatagctcacaacccaacgcaacaatcagcatcagcgacgatctcaacccagacgcccctgaacgccttcatgatcacgccgtggtgcttccgcgcgttgagcgacaggtagcactcgagcagctccagca

SEQ ID NO: 75126 - DNA, 283 bp, Oryza sativa
tcgcgacgctatagttctttgactctccagtggtgatggtacttcttcttggcggcattttctttgtttctttccatcatcgcctgcccttgttgacctgccttatatgcaacgaactcgtcccagtgatcccttagctttgggaatgtgtcgaagttcggtgtctgccccttcatgatatatttctggtatagatcttccttgaagctctgcaactgctctgacaatcacttatattcctatttgtacctttattctctaatcttcagttcttaactcaatt

SEQ ID NO: 75127 - DNA, 414 bp, Oryza sativa
  unsure (1)..(414): unsure at all n locations
atcttctgtttgttggntttgtcaccaaaacaagcagttgttgagaagctagaggggacagagaatcgacatcttaagacattatatgtaaacggctttgttaattggaagccgatgtccacgatgatggttgatggtggggctacggtgaatttgatgccatatgctacatttcgaaagctacgcagaaatgctgaagatctcatcaagacaaacatggttctcaaggactttggtggcaatccatcagaaaccaaaggggttttaaatgtagagctgacagtcggcagcaaaaccatccctacaacattntttgtcatcgatgggaagggttcctacagcttggttcttggaagggattggattcatgctaattggtgtattccttcaaccatgcatcaatgcttgatcaat

SEQ ID NO: 75128 - DNA, 242 bp, Oryza sativa
  unsure (1)..(242): unsure at all n locations
aacttgtgtggacaggattagagtgtcataaagatgtaagcactaatcccgagagtgcaagccgccatgacaagattntaccttttgtcgaagatcgaacctgatgcagcccaactcgaaagcaaaaactcatcgaaacaatgaaagtaaaagggtaacgatgcaccgaagtgtattgaactgtcgtccctcgattacatggtgttgggccatttttaacccaagtatagatatagccttcg

SEQ ID NO: 75129 - DNA, 398 bp, Oryza sativa
agcttttggatgttatacgtccacatcttgttaaattgcgttctgctatggtcattgatcacagggatgcttcaaatgtatgtttcatgctgtctttaatacatcgatcatctagatgcattcattttaggtgaagaatttatctacttctgtcctgatgctttgctgctcaggcacttctgatttgctactcatgtgcattattaattgcttattttttccagtggagtccacaccagttgcgcatgttaaaggacaaatttgatcaagcacccccgccaaatattcctttagcagacaaaaaggaaattggtatatcttttcaagctctaaccttactttatggcattatgaaaaatgctttgagctatggtatcaaggcagcacatcagtcaatc

SEQ ID NO: 75130 - DNA, 427 bp, Oryza sativa
agcttattcatacaactcaatccttgttcaggttcttcctagaaatttctcttctttagtccctcttcgtgaacatatatctgaaggatttggtcaaattcttgagtaggctcttactttttttttgtcaagcaaagaagctccaaagttatatttacaaatctggaagtggacagaaacctagctattccctgcaaattcagatgaaaaaaaaaaccagacataaattgacttgcatttcacttaattacatttcttcatgcattgcaaattatgaaaaaaatggaagaaatatctgttcctgaatcatcctgaatcctgacacacagtgcactgaaaatatataggaatgttaatgtgcacaacctgaaaattcagtgtcattggacacagaggcccagcagttgatcacctggttgcctggatg

SEQ ID NO: 75131 - DNA, 121 bp, Oryza sativa
  unsure (1)..(121): unsure at all n locations
atttgccgatttggaggtgaccttatcaaggcaaatttcagtttttgtgtaagttactgctaaacacggaaggaanaagtaaagcccccactatttattcctcctccacaatccatccatc

SEQ ID NO: 75132 - DNA, 411 bp, Oryza sativa
  unsure (1)..(411): unsure at all n locations
agctttgatatgctntgtgtgttgatacgaattccagattcaacaagacgcacgaccatttctcgtgtctgaaagactacaacgattatctagaagaggttgaggatatgagtgagttgttacatcaccactttggttggtcgttcttgagcagtaacgggctaaatgtttctgagttttgaccaaggcttatttgtgtaagattcgtttgtttttatgtatatatagctttcaacctgattgaggggatagatgtcgaggagattgaagctaagattgccaggtaccagcaggaaaatgctgaacagatatacttgtcccgggctaaaagggtatgtggtaaattgcttcaggctctggtgcgagtagaaaaaaaaatacttcataggttgttccatgaatttttgcagt

SEQ ID NO: 75133 - DNA, 308 bp, Oryza sativa
  unsure (1)..(308): unsure at all n locations
agtttccctcccactctatcattttataactctacctatacacaagttttcctcccactttatcccttcataactctgcaaaaacacatccatggctttagatctaaactactccctctatcccctaatataagagatnttgatantttgcttgcactgtttgaccactcgtcttaatcaaaaaatttgtgcaaatacaaaaaacgacaagttctgctttaagtactttggagaatgaagaaagtccaaaaaactactctttcatctctactttctgtctctgatttgagctatctagtatttctata

SEQ ID NO: 75134 - DNA, 373 bp, Oryza sativa
agcttactcattactctcaaaacctccaggcctgtgtgccaactgccaaccctattccaattcctctcacttgcatgaatgcatgatagaatctagtttggcttttccttatgctgaagaaccttctacagaagaatgttttgcttttgcttactaatcatagcgtggtcagctgaatgatcttgtcaagccttcatctttactatttatccctctaaaaacaaagggttgcaactattcaatgcaggaccctgacggacaacatcatcgtaggggtatcaaaagggtttgacaagaagcttcagttagttggggtcgggtaccgtgcagctgtagaaggcaaagatctcgtgatgaatttgggattctcgca

SEQ ID NO: 75135 - DNA, 248 bp, Oryza sativa
  unsure (1)..(248): unsure at all n locations
tcttcttgaacacacactngcaccccacaggtttacacccatatggtcgctctgtcacctcccaagtcccgttagcgataatggaatccatttcactacggatagcctccttccagtagtctgcatcaggagatgcatatgcttctaaaattgacttangagtgtcatccacgaggtacacagtgaaatcatcaccaaaagacttagccgtcctttgtctcttactccttcgaggagcttcactgaca

SEQ ID NO: 75136 - DNA, 418 bp, Oryza sativa
  unsure (1)..(418): unsure at all n locations
agcttcatccttggtgaatcccttgagatttgggtcaaggattctgagagcttgctccttttcatactggtcccaggcctatagatgaccataggtttagtacacaagagataatacaaagaaattaactttttttatcgcttagggggttcatggagggcaaacacaaaaaaggatagatgggcaagtgttggcttgatctatgatgaaatgagactagattagttcatattgattgcttgcttgctaattgatgcatgctatacccttntgtaggtatgtctagctagttgattcaattgatctatccctaatacatggaatatatccataaggcgtaactcgacaataaggaaattaactattcttatctctaatttaaacgtataacaaacaaacagaccccatgaaaatacta

SEQ ID NO: 75137 - DNA, 192 bp, Oryza sativa
ccaacagacactgagattatcgatcacacgcatcgacacttttgacatgagttatatacctaccaatcgacaaaatgtttcagtctttccagagacggagttgaactgaacagagataaggattcaacgaaaagatcgatgtatgcattgtatctgaactgaacgagtgacgtgtgtgttgtttaacatgat

SEQ ID NO: 75138 - DNA, 221 bp, Oryza sativa
cacagccacgacgcggtctgtttctcgtctcacgggtggaggaggaagagccggctctgctcctagctcacgcaagcatcgagctacctccagcggcaccggccgcagcggctttactccaccttgatgagccgaaggtactcgtctccctctgcgacggctccagcaacgacaaggctgatgggtggtacccttacaccggcgccgaccatcacatgacc

SEQ ID NO: 75139 - DNA, 357 bp, Oryza sativa
gaccgggaacggaaagcaacgagcagcaaccgtttgtttatatgaccactccataatgcgtgcgccacgccctttcatcggaaaccgcggcccctgattatgaatcgccaaccaaccctgcgcggccggccgcgaccattctatgttgacactatcacgaaatatgccaacacccttaaatactatgatgcgaacaccagcgttaaggcccaaaactgctaaaaaatacgcccgcctgcactcatagcagatgtgaaatataaacatctgcgaaggaagcatccaaacgatgagaaccgatcgcacggatagacctggcgctgagtaaattgccagggaaacgggcaaaagagtcaa

SEQ ID NO: 75140 - DNA, 428 bp, Oryza sativa
agcttttcttgtctataatatgtggcacccaaatcgccaacttgtaaaaatgtacatactgttatgtaagcctttcggcacaaaaatgcaaaaaaaaaaagaggaaaatgaaaaaaaaaactggatgtagggttattatccaccttggaggcccgaaccagtataaaatctttgtgtttttcgcctctttacctgtgtgaatgataattcgtggaaaaaccccaaggcaaacgcctaatcagtgaaaacaccaaggggtgaaacgaatcggccgaagcatcgctcgccgaacgttgaaaccgcgagagcttatttcggaaataactaatcgaacaccgttatgctcgatcaatgtgaaaacacaagcacttctttcaactcggaatgtcacaaatcgaaaacggtagtcgaaagctgaaaagtcagca

SEQ ID NO: 75141 - DNA, 149 bp, Oryza sativa
cataaacttcctcctgtatataaccattaagaaaagcacttttcacatccattagatacaatttaaaaccttttgaagctgtaaaagtcaacaaaagtctaattgcctcaattctagcaacaggagcaaaagtttcatcataatccaac

SEQ ID NO: 75142 - DNA, 428 bp, Oryza sativa
  unsure (1)..(428): unsure at all n locations
agcttagctattcctacctaccatcgcacatgaagcaatgttttgctttctgtgccatattccccaaaaattatgagattaatgtggaganattgattcaactatggatggcacatgacttcattccactagaggagaaatatcattttgaaacgacatcaggggaaagaaatttcaaggaactagcttggaggtcattctttcaagatgtcaaacaaactcctcttgtgtgcagtaataatggagacagggtgcaactccgatacaccaccacatgcaagatacatgatcttatgcatgacattgctctatatgttatggggaaagaatgcgtaactattaccgataggtcctatcgcaaagagttgttgtcaaatcgttcgacttaccacttgctcgtgtcaaggcatagaactggagatcatttc

SEQ ID NO: 75143 - DNA, 234 bp, Oryza sativa
agccactctttaacactgtcttcagaaggtcggaagctcaaaggtgaaatacatgaaacgactagcagagtgcatgcatgtgttagcaaatttatggaataaatgatgaaagaaacgaagttttagcgaccttacaactaaaccaaaataagtattatgccacactgataaacacttgttatctagctaggtttaattgtgttattggtttcgttcgcgcctttttaattgttg

SEQ ID NO: 75144 - DNA, 425 bp, Oryza sativa
  unsure (1)..(425): unsure at all n locations
ttcttgatatatatacaacatatagctcaatccgtttgtaaatgcatatacaacaattttgacttttaaacataatatttaaatattcgtacatcttatctaagatttagcgtaaatgtgcatggtgtagttaaattagacttatagtaccattaataataaagcaagtcacatcaaaataattgaaaaaactttcatctgaaagcaaaacaaataatatttatataattttcttaaataagataaattatgaaagttgttatactcccaaaataaaccaacttttaactcactactggaaaaancaatttcgtagacgacacccatttcactatgcaggtggatcaaaatgccacctgcattgtcgtggatggggaaatgatggtcattcaccagcgaaaatatatattccagatggacgactt

SEQ ID NO: 75145 - DNA, 201 bp, Oryza sativa
acgggttttaagggtaactaatgaacgatataccgtttatccaacgaaacacttttaggtattaatgtcagcaggatatttttagggaccaaatttgatactcggagataccaagatattcggtacctaaataccatggtaagcatgagaccttagataccattttgatattattactaattagagataccagacctatat

SEQ ID NO: 75146 - DNA, 400 bp, Oryza sativa
  unsure (1)..(400): unsure at all n locations
agcttgctgccccctcatcgactcgttcgccattaagaccctgaaccctcctcaaagaacgaaaggtaattaattaattgagccgggtgctaacctctccacaaagctgctatcagtgtgcatctctacaaaattgaatacaaggatgtgctcacagtcatgaaacaatcgaacaaaatgaaccaggtaacatgctgaagaatgggggcttcgaggagggcccgtacatcttccccaacacgtcctgnggcgtgcttgtgccgcccatggacgaagacgactactcgccgctgtccccgtggacgatcctgtcgaccaccaagtccgtcaagtacatcgacgcggcgcactacgctgtgccgggcggcgcccgcgcggttgagctggtgtccggcatgga

SEQ ID NO: 75147 - DNA, 171 bp, Oryza sativa
cgccctacacaaccacacaaatctgtaaaggaaaaaaacatcagaagtaccaacctacggagagggtttcatcgaaaaaacttacaattcaacgaagaagctgtgtttggaacccccgatcccgagcgctgcctcgcgtgatacaattctgatttaccaatctcccttttt

SEQ ID NO: 75148 - DNA, 425 bp, Oryza sativa
  unsure (1)..(425): unsure at all n locations
agcttaatctcaatcttgtgcaaaacgtcaattaatatagaaccagagggagtaatgtaacgtcccgccttccctatgccgggcccgcttacatttgatagctttcataagtcattccgcctcccacaagccaagcccgcttacatctgatagctttcatagatcatagactgccctcacagaccaacacatatcttttctgcattgctccaggccaagcacgcttaacctggagttctttggagattggcttccggaaaagaagttgcaacttgttgatatgagtattctattaatcctattaagttctagactgggatgttacaccctcacccccttaagagagatcgacgcccccgtcgatcaaccctatgccaggaacgtnctctcttggccacatccatgtgtccagtgctagcgcatgt

SEQ ID NO: 75149 - DNA, 225 bp, Oryza sativa
tggcttatttgggtcacatcattagtgctcagggggtagcttctgatgatgagaaaattattgctgtcaaggattggcccactcctctttctgtcaaagacttgcgtagttttttgggattaactggttactatcgcaagtttgtcagaaattatggtgttatttgtaaaccattaaccaatttgctacgaaaaggggtactggttcaatggacttctgtcactc

SEQ ID NO: 75150 - DNA, 412 bp, Oryza sativa
  unsure (1)..(412): unsure at all n locations
tgcttgcagagacaattagtattgtgcatcacttgaggactaatatattattccatacaaggacatttgtgtaataacaccagataacttttatttgtagcttaactagttcttataggaatttattatacttcacttaagttgctctcttctaataaattttagatgcatgagatcactttttatagtagtcaccactagatgagcttttaaacaggagtctaactgtcctgcttttgttgcagctgatgaggttcttattataaaaagtttgacgcacaaagaaatcaatgcggtgataaaggtaaaaggttatatgatcacatttttctttcgtccagctgagcatgttgtacaattcactatctgtctcttcttgaatcatactaatgtgaagcatgaatntcatgct

SEQ ID NO: 75151 - DNA, 407 bp, Oryza sativa
  unsure (1)..(407): unsure at all n locations
cttaagcttaacatacagccatgccaaatcatcacccactagcaataattatatattcaacctcatgcaagcatgcaacatcatctacaatntatttaattctacaaatcaacatgcaaacatatccaatcatcacccctcgcatcatttccacaatattnttacaaatctatctatcatttgtataatatttaaaataaacttatcaatatgttccacattanaagcgggttttatttgtttgtttcatgataaatactgataagctctgatattacatttgtttttttaaccccatcatcgtgtgactagaataaaagtgttttatctatctacttgtatcttcattagttcacatcatagctcatatttaactatatttcgtgtggagacttctaaggatctat

SEQ ID NO: 75152 - DNA, 415 bp, Oryza sativa
agcttgatttgacagaaactaaaccagacaagtcttattagtggtcaaactttgcatacattacatatacatagttacataccatataccatttgcacaatttaaaattttgacgtgtgttatatatcctgatcttatgaactcccaactcaaaaggtttaacactaaattcacgaaaaggtttaacactaaggatgcaatggatcgatgatttagtactcccagaacaaaaaagttttgacagtaatgatattggatccatgctgatagattaggatggggtttctagtaaccatgcaagcaattgctggtttcattactcaacaaactaattaagttcacatagttcttcctttatttgactctgggggaaatagaacaaaagaattttatgatgtattgatgtctcaatctt

SEQ ID NO: 75153 - DNA, 289 bp, Oryza sativa
  unsure (1)..(289): unsure at all n locations
ctatgaaactcagcttcacattgcggccgatctgagtcgagaaatatctctgaattatgcgttgatagggtgctcctgcgttcttcaatccaaagggcatggtgatgtagcagtaagccccgaagggtgtaataaacgaggacttcaagcagtcggattctttcagtcgaatctgatgatatcccgagtagcagtccaagaaactgagtaactcgcagcctgccgttgagtcaaccacctanttaatgcaaagttactctacattggctctttactaatattttacata

SEQ ID NO: 75154 - DNA, 406 bp, Oryza sativa
  unsure (1)..(406): unsure at all n locations
agcttcctctataatcaacaatgggtacaattggagtcttctctagaacatctagaggcacatctcaatagcaactacaacatcaagttacacacttggcatcatcaacatcaaccatcaaagctaacaagaggtatatcaacaaacaagcagagaaatggcagattttgtgctcttcggttctcagctgagatctctcaaaccacagatgcaaattgatgaaacatggcagaaatgatggtctatgagtcccttccaagctatccaaaaaacagcttaatcggacaccgtttgacccctcaaactgacactntactaattgttgcacaatctgtaaattcagtaactcgagttgataaaccactactcaaatccggtgctctactcaaacatttctcatccaaac

SEQ ID NO: 75155 - DNA, 373 bp, Oryza sativa
agactgacattattctgggctaacgagagtgcaacctccaaactattaagagctagggtaagacatcttagcataaacaatcaatggcattgatctcggacgataccactagggtcagctcattaattgtctacttctggtgcgccaaaaagtatggtacttcacgaataaccttgagctcctgaataacaaacagattaatatacaaatctgctcactattacatataaagagaacaacagtgttacctcaaacacacttttaatttatatagcaataaagtttgaacatattctaatcgaatacaactatgagatacatgtgctgattccggattctgtttaattgacgatggaggcttatagtcattgga

SEQ ID NO: 75156 - DNA, 428 bp, Oryza sativa
agcttccatcacaacgggtatacaatcgctttatccagtaacacttgtggcacccaaccaatcagatcaggagcgacggctcgtcttgagaggctgctgctgctctcatcattgtagcgtttgtgagctcggttggtgcctcgtaaagactggagctagctgttgcttgcttctctttcttcgtattagagaatcgtgtcccgtggtctccttcgctatgcatgtctttgtcacggcagatctatcgtatccttctaggggttctattgttcttgttagcttgagatttatgagtttttgggttcggttacctgtgtatatgtctgaaatccgaattgtcagtcaattcttttcgtaagagaaatatgttcttttagttggatgtggaacaaatttataaccagtgtgtgctactcatcaatgatcac

SEQ ID NO: 75157 - DNA, 152 bp, Oryza sativa
  unsure (1)..(152): unsure at all n locations
aatgatgatcagagtccgtaatcagagccttcagagggagagagagagagagaaatcaccttgataaggaagctctcatacatgcagctatctgagagtttagcaatctttctccagatgatcgattcatggatcttggtaactcttncttt

SEQ ID NO: 75158 - DNA, 424 bp, Oryza sativa
  unsure (1)..(424): unsure at all n locations
agcttgttcaaggacctattgctcatgttattctctagcaatacagatattatgtccttcccctgtagttgcatgggaattctgaaatattttagattgtttaacttcacctaaaatcatgacaatgagagaccacatcttgtttctccaggccagattgaactcttcactcatgtcccagttctgcgtaactttgttgaacatttgaaacgaaaaaatttcaacgtttgtgccgtgtactttcttgattcacaggtttggactcttggatcactaaccaaatatatttatccttgaaaaaagatactggccccaaacacaagtagacaagtctgacttgagttttgtttttcttggttaagnttggtagtgatgtgacaaaatacatcagtggttgcatggcttctctttctgccatgattca

SEQ ID NO: 75159 - DNA, 215 bp, Oryza sativa
  unsure (1)..(215): unsure at all n locations
catttgacctttgctcatccattgtaaaagctctatgccatgttgagattaagttactagagagttcgaattgcaaaactatgcatggttcaatagccagtaatggttttccgtaactgaaagaaatggaaatactacctcacgagaccaatcaagtgaggccccaaggcggtgcaattgattcaatatanttccaccataccgctctttccatt

SEQ ID NO: 75160 - DNA, 434 bp, Oryza sativa
tcagcttgccttatgttattatcagcagtaaagatgatagcttcaagtccctctggcacgtaaggaaacttggttgttcaagaaaagtagagattagattaaattaaaccagctcccatatattgggagcgaatacaaatcgtatgaatggtagggtggtaatatgatataaacgattgttgtggttcatatgaataatccaggcacttggtacaaattaactagatgatcaaacattcccagtatccagtatctacatcacagagagaaaaggaagaactttaaagaaaggtagagggagttgctcggcttcaacattgcatgcaagaaaatgcctagtgctgaacaatagaatgaactgaagagccattatatgatgacttacaagatttatgacctcttcactttaacagctagatgtgcccactcaactt

SEQ ID NO: 75161 - DNA, 332 bp, Oryza sativa
ttcttgcttctcttagagcaaaagacagcctcacatatataatcaggtcaatgcagttactggaaatagactggtctccactatgtgtaactagacctcaacgtttgagaaaaagcgatggagccttctctatgactgacttggacagaccatctctttgatctattctgtctccccctcctttatcgtacttgttcacttcccccctctcttccatctacctttcctcacaaactttctctatccctcttttgttgatcctttcatctctagttgtctttacttcactagattcccagtgttatgcattgtcccgcgatactcgtctgtac

SEQ ID NO: 75162 - DNA, 126 bp, Oryza sativa
tgccggctgcgttaagtgcgctccagaacttaacgtggagggtaaattatgcagtctgaacgtatttatttggcaatggccgctcctcgtcatgaatcattgaccgcacatattgctgatgcgatc

SEQ ID NO: 75163 - DNA, 400 bp, Oryza sativa
atcttttactgtacaagcagaatcaagtcaaagattggttaatgcttacggaatccgaatatcgcaaggccaaacattacagctgcaataaccatcaaattgtactgcctaaaaggaacaaaacaaaagggaaatcacaatgaatacgttcagaattttccaagtaaaagttcaatgctgattgggttattacgcaaccatcatacgcacatcttgtccatcacatgcttgatcttcttggagttttcgagcgcgcgcgtggagaactcatttgcaaaagaattcagcttatcctcgatgacgtcgatcttctgctgcacttgaactggtaggaagacctgatccaccccgatgttcttggctgcagccaagctacctgagaagtttctcagactatcca

SEQ ID NO: 75164 - DNA, 424 bp, Oryza sativa
tgcttgtgcttggcaaaacttgaaggaactcatgggcttgcaatacccatggtgcaaagagatcatcgcacaattctatgccaccggttactttgagccaatcaaagaaaagactattcattggatgacagatggcatcatatactcagtgacatatgccaagtttgctgccattttggggtttccggctcgctctcgcaccaatcatgtcaagattcatgatgagaagcccatggacacaaattctcttcacttcttgtaccaagatgtggactatgagttaagaaccatcaaaggtcttcgtcccttctatgcctatctcaacaagcttttgcacaaaactctctatcccaaggaaggtgatgctagcaacgtccttgcctatacaagaaatttgctttacaagatgaaggctcacccacag

SEQ ID NO: 75165 - DNA, 166 bp, Oryza sativa
aacaagactcttcgcgagttcattgctccctctggtgacaatgtggccattgggccgcatgtcaacataagagatgtggatttcgacttgaagtccagcctcatcacaatggctcaagctatcccaatctgtggcaagcctaatgatgatgccaatgctcatttga

SEQ ID NO: 75166 - DNA, 376 bp, Oryza sativa
agcttatgatattactctattactttaactggggatgcatgtactgaaattattctgaagactggcaatcacaaaagttatatccttcatcaactttgtattcctcggtgctacttgcttctgtccctgtctaatactccctccatctcaaaatgtttgacgctggtaatttttttaaatatttttgaccattcgtcttattcaaaattttttatgaaatatataaaactatatgtataaataaaagtatatttaacaatgaattaaatgataggaaaagaattaaaaaatacttaaattttttaaataagacgaacggtcaaacatgattaaaaaagtcaacggcgtctaacattttggaacggagggagtatta

SEQ ID NO: 75167 - DNA, 224 bp, Oryza sativa
  unsure (1)..(224): unsure at all n locations
tgccttctaccatcatggatataaaagcttctgctatatgtacactgtcacagtttatggaaagttganaaatccaacaatagatgtactaaatggattttggttatgttacacagaggcgaggtcgtgcatgacgtgttcagcctggtgcttgctataagctgtatcctaaagtcatttatgatgcgatgccacagtttcagttacctgaaattcttaagact

SEQ ID NO: 75168 - DNA, 408 bp, Oryza sativa
agcttatcagtctgcattacatcatccatgttgacaggatcttcctgttgcatactattcagcaactctgcggctttggtggatgcaacacccttggcccgaacattgggaattactccaaaggcaaactggggaaagaaaggaatttgcataagtgcagtactataatatttctatagtgtatagatatttacgtgtgacggaattaaaagatgataaggttgcagatttgtagcactgaaaagtactctttaaactacagtatggtatagatgataaaaatttagtctgtccatagaatgcttctgctataaacaaatataattgaacttttgtagtacaccctctggtcttttgcatttgtcatcctagagtatgggccacaaattatgtgaatcttttaccaca

SEQ ID NO: 75169 - DNA, 267 bp, Oryza sativa
tacacacgcaccattgctacaacttccaaacaatggtaagtcttttgagttaaaatgtgatgctagtggagttggcattgagggtgttttgatgcaagctagtaagcctgttgcatactttagtgagaagtggcatggtcttgttttgaattattccatatatgataaggaatttaatgctcgtgtacgttctttagagacgtggcggcattatatgtggcctacagaattcgtaatttcttcccatctcattaatgtctctaatta

SEQ ID NO: 75170 - DNA, 421 bp, Oryza sativa
agcttcgctctgatatgctgattaaaaaacagtagcagtttagcacgtcaagttcagacttttatctttatctcttgtagtaaattttataatgtttagtcctaattctttccgcaggcaggagacggccaaccaaagaaataaactactcgcatctatcgctgctgatcagctgccggcagcacaccagccacctccactcctcgctctgtaacgctaccccgcatgctcagcccagcaagacccaaaaatccgagcgtttccaactaacatgcaaatttacaaaattatcctcccatgcacgtttctactaccattaaatatggtggtagtacgaataggtctgatcccttgaatagaaaagaatctacgggttagctagatttatttttactaccattagaaagcaccgttgtgagat

SEQ ID NO: 75171 - DNA, 296 bp, Oryza sativa
cttgctgatctgcagggccgttgcaattctgccagaaaaggatttggactatgatttgatgggcgaagctacagcctgactgggtgtttatctcccgactgaaagatgactactatgggatatatttttggtccatacgggcgatacaacgctcttatgctaagatgcatttttagttctccctattttccggtactcttttgtcttttttctattatttgtcgttacagtttttcatttcttctttgtcatattttattttaatcctctttttcattcttttttattattcccta

SEQ ID NO: 75172 - DNA, 415 bp, Oryza sativa
agctcttttcctgacttgctgcatcaaaaactaaatcacaagcttctgataaaaaacgggtggttctagcgagatttgtaatatgagtacctttacgctttgccgagatgtaaggggccattttaggattccatttcttaataccatgaccaaaatgaactcccgcttctatcatctctttcaaattgatgttccaatatcttcttgtcattttttccacacttccttttgattttttcttttgtttcatcctacctttccattacgaaatttctttcttttcaaagatttagaaagagccgaaatagcttgaaataaataataattgttccgatggaaccttctacatggtataagcataaccttaatgaattaactaaacttctctttaaattaaaataaaaatagaaaatct

SEQ ID NO: 75173 - DNA, 141 bp, Oryza sativa
aatccttcgtactgaccatgggatggatatcttgtctaagatatttaaatcatattgcaagtctgaaggcattgtgcgtcactacacccgtcctcacacacctcaacaaaacggcgtagcagagcgtatgaacaggacaat

SEQ ID NO: 75174 - DNA, 429 bp, Oryza sativa
  unsure (1)..(429): unsure at all n locations
agcttgtattatgggtagttatnttccttatttaagtggcgcatggcattgatttatantcgtgntcacttgttcagtatggtgcattattgatcatcgcctagtgggattagtttaaggtaataatccattattcccaatttacacaaaacatacacatatatatgctaacactcaggaatgctaattagcgcgtatgcaccgtaaactcaagtcgcgagctcaagtcgcgagcgtttctcaatgccctcgcaccgctgccacagnccagcgctcagcccaccactgtgcttcttctttnttgcgcaacgctntttttcttttttttttttcacgcgaagtgccgcacgtgtgcatgtggagaataaactgtgaattttgtttccaaaagtcatggcaagataaccttcttttnttttcattcttttc

SEQ ID NO: 75175 - DNA, 429 bp, Oryza sativa
  unsure (1)..(429): unsure at all n locations
tgccgcatgcagcttgtatctcttttaatcagngacaagcccttgaggatgtatgtcttgtacaaaactgatttgtagctctggaatagctctgccattatcttcacggtccattctttgcatctgggacgatctgcctcaaggatcgtgaatgtctccagcatggtggtccacaacatgtccttctctgtgttagggagaaagctatcttcatccccgcgtgacctagttcgacgccagtacactatgctgatgaggacgttgttcctcacgacccaaccacaatgattcacaaactttcgtcctatacccgaccgggctactgtgtcgccgtctcgggcaatctaagtaacgatgtgccttctctcaagcttcttcgcgggacctcttttcccgcgtggccttctctgtccggacgacaggtgacta

SEQ ID NO: 75176 - DNA, 412 bp, Oryza sativa
agctttagccgacttcatcgacgagtggactgagtgccaagaagacatgcctgagaagaagatggagtattggaccatgcattttaacgggtcgaagaggctctcaaacactggagcgggggttgttctaatttccccgactggagaaagactgagctacgtattttggatacatttttctgtgtctcacaacgtgactaaggattgtgatttctttgggaatccggcgtctgatagttcatggagactctcagctggttgttaatcaagtcatgaaagagtggtcctgccttgattataacatgaccgcctaccgacaggaggtacgcaagttggaagacaaattcgacggacttgaactcacccatgttcttcgacataataatgaggcagccaacagactggctaattt

SEQ ID NO: 75177 - DNA, 160 bp, Oryza sativa
acaaggcatgttctatgattcttacccgctgccctgcatagatcagatcgtcgactccactgcggcgtgccgaactttcgagttctctagatgcatactctggataccatcctaatcgcatggctagggatgatgatgaaaaaactgccttcattacccc

SEQ ID NO: 75178 - DNA, 421 bp, Oryza sativa
agcttccatgccttagcatggaacagcaattggaaacggtattgtgagtagtatatggtcacctgaatatactgaccaaattgacacctaacactgtactgccgaatgttatgtgagtattaacgtgagcttgcaaaatccccacgccgcatgcgcgtagtctctcctctgtgacagggaaaatggcagattagcttgcagcaacaacatcagtggccgggccggagccgaggagttgtcgaagcttgggttcagcatgctctgtgtgtctgacactcgtcttgttcgtgttgtcgatcattgacaaaaagtttttcacgacgcgaggagaggaggctgtggtggttttctgcagagatgtttctgcctgtgtcgatgctgcaggatcctttaacttcccctatgaataataaggcacatt

SEQ ID NO: 75179 - DNA, 260 bp, Oryza sativa
  unsure (1)..(260): unsure at all n locations
cctataaaactcagcttacaacagcaccttcttcagagatctctggatatggaggatttggaagctctaagaatcttcctggaaatttcactcttaatcagaatgctgnctctgcatcaacaaatcttgggtttgacgaagcattgagcacgccatacaaagatcccagccaatatatggccctccagcaggtaacaattgcaagcagcccttgtgtttctttggtaatttatatgctatataataattctgatatgcac

SEQ ID NO: 75180 - DNA, 400 bp, Oryza sativa
  unsure (1)..(400): unsure at all n locations
tatcttgtttgtttaatggatganaggataatcccatctattactaacactctgaatgcgaaaagcaagaccctcaaaaaccatgatgtattgatatgtgggtctggaactgttgaagtaactgtgggcaccattacacatgcagtaaattngaaggaaaggacatgtacttgtagggcttggcaagtgagtggaaagccttgtgatcatgctttggctttcattgcaaagcttaatagggaggtacaaatggatgattttgtggataagtgcttctctatagagatgttgaaaatggcttatgcaggacagtttaatccaatggcatctaaggatgagtgggcacatgttgatctatgctataaaatcaagaagcctatgttgagaaggaaacctggaa

SEQ ID NO: 75181 - DNA, 186 bp, Oryza sativa
attcatgtaatttcgaagatgcaagtatgcaacaacaaagaaaaaatagtcataatagctaagcctcaataaacttttgtttcaaattatatactggatccacactctgatagtatcattgtattctttaattaaatctttataacaagatcttacataatagtattttgatcaaaataaaatata

SEQ ID NO: 75182 - DNA, 296 bp, Oryza sativa
ttcttacttaatatgaaaggaaagctgctagagtcatacccgaactcttctgaagacttccagactcctgatttctactctatttctattacaccagctagataacactaaactaacttgagggaatatgagagagctcttgcttgaggtgtccgagtaaagtgagaagaggagctcctttttataagcaggtaatgacggttgtgacggttggaatggtcggtaataccctccaaccatcattggggatcaatcccagccatccatccaaaccctgcatccattggcactacggg

SEQ ID NO: 75183 - DNA, 404 bp, Oryza sativa
agctttatttactcgcgcgttctcacaccttcttacacgctgaaacggtgtggaactgtggatcattaatttacgcgctaaatcaccggttaggcctcgtttagatctaacaatttttgtaaaaaatgtcacattaaatgtttagatatatgtatagtgtattaaatgtgggggaaaaaataattgcacagtttacacgtaaattacgagataaatcttttgagtctaattacaccatgatttaacagtgaacatttgctaatgaccgattaattagttttaataaatttatcacacagtttacatgcgagatctataatttggtttgttattagtctacgtttaataattcaaatacgcgtccgtatacttcgagacctttacacccaaagaacacccttata

SEQ ID NO: 75184 - DNA, 131 bp, Oryza sativa
  unsure (1)..(131): unsure at all n locations
tcacctcccttgggaccccacgcatatccgccgggtttcatgcgaagacgtcagncgtttgccgcacgaaagagacgagcgcgtcttcctatttgtcatccaagagaccaccggtccgtgtggtcttggac

SEQ ID NO: 75185 - DNA, 422 bp, Oryza sativa
tcgcatgcaagcttactaatcttcgagaaaacccgcgatcgacgaaaattcgattaccacaactatacgcaaacaatcgaaaacctatacaaaggaccaaaagaaagatcctatttagactaattagtagtgccattaaatagatctcaattttactgaattagtggaagtggaacggatgcgatcggagctacggatcgagggatatgaatatcggaggtctaaatggattttctggacaaggaaatgttctgtcagaatttatggaaataatattctcaagaatattattgacagtcactgaccaaggaaaatgattcatggaatttggaatatagaatagatttctgaaggagggaaaaatgatctattgagattatagaaaagagaaatatttgtggaatattgaaaagacattctca

SEQ ID NO: 75186 - DNA, 211 bp, Oryza sativa
  unsure (1)..(211): unsure at all n locations
tgcattcagtacatttgctctctggatgatgttgatgctatggtcaggaccaaaggctatgcaaatctcaaaagaagttgcccttctgtgttggcagatntatttgagaagacaagcaagttccgtgcttcttgattaattaagcttactctatgattagttaacttaactccctataagattagcttggccaaactttaagccatgggct

SEQ ID NO: 75187 - DNA, 420 bp, Oryza sativa
agctctattgctatctctagaggtaacccacattgatgtaatgaaagtgaaggacccacaacaatgacagaacgccccgagtaatcgacccgtttcccaagcagagtttcgcgaaacctcccctctttaccttcaattacatctgaaagtgatttgtatactttattgtgaccatccctcgttggttgcccgcgggacccactatcaagaagtgtatccacggcttcttgtaccaatttttcctggcacattactaaatctgctggcgctaattcacttctttttaatagataggcaagattgttgttccgacggataactctcttataaagttcattaatatccgaagtcactactttatccccagacctataaacaatgggtcttaattcgggaggaagaactggtaataagcacaaa

SEQ ID NO: 75188 - DNA, 242 bp, Oryza sativa
tctgcaatttctgaatcaccctgtagaatggcctgttctctccggtcggaataggtagttccttcccctagaaccgtacttgagagtttcctacctcatacggctcagaaattgctatcttaatttcccttgtcttaactgaattcgatttctcaaaaatcgatccaatatcttcttgggttacgcagaagaagttaattacctaagtttcaaaccctaaatattgatcaatattcagtctg

SEQ ID NO: 75189 - DNA, 419 bp, Oryza sativa
agcttctttcagggttaaaagatgagcttgcagtgcaactactcctataggattatgaagatcttgagaaacttgtggacaaagccatgcaactcgaaagtgagcataatcggatgacgaactgcaagagaaggattgtcaacatcccagtatttccatgtggtaaccaaagacagcgcactgagccacttcagatcaccggatcttctgttgtgcatcaagagttcctgccccaagaagatgaacgcaatgcagacaacaacactagcaatactaatgatgatgataccaccaacaaccatggttcttgccccattagtgaccactcaaatcaagcgtgcaatgtcaacatcattcaccaagatgtcgacgatagtatcaatgatggcacccacaatgacaaccctagtaattgtgac

SEQ ID NO: 75190 - DNA, 374 bp, Oryza sativa
  unsure (1)..(374): unsure at all n locations
agcttcaacaccttggattccaaggatccaaggcagatacttctctattcttttataataaaggaggtctaataatttttgtgcttgtttatgttgatgacataattgttgctagctcgagacaggatgcagttccagctctgctaaaggacctacaaaaggattttgccttataggatctatgtgacttacactactttcttggcatagaggtaaacaaggcatctagtggcattgttctaacccaggaaaaatatgttactgatctactaagacgagttggtatgactgattgtaaacctgttagtacacctttgtcaactagtgagaaactcactttgcatgaangagaattattatgtcccaatgatgca

SEQ ID NO: 75191 - DNA, 347 bp, Oryza sativa
  unsure (1)..(347): unsure at all n locations
agcttnctctcgtcgtcctcttaccgttgccacatctaccgagctcttccgtgcatcgtaacggcgccgccgcgtgcactaagctcgacgccgtcgccgggcgtctttcgtcgcgtcgagccgccgagttcgccgtcatcgacgctttgcgtcgccaccattatgtgcgccgtggtgagagggaccttggccacccgttccccttcgccggcgaccaccggagttccgtcgtcgtctgttaagccgagccgccgtcgttgccctctcgtatgcggacgtcgacgtgcattgattagtcgcaaggtgagtaccgatgggttcgcctcgtcgtcctctacgtgtacatg

SEQ ID NO: 75192 - DNA, 408 bp, Oryza sativa
agcttatttttgcttgatatcactcactattatcaggggtgtgttctctcattcagaagatcagaatgtaaaccaacaaattgtttacactaaataaattaagagaaacgactcaaaggcatcctctgatacctgtcatctagatttacatgagagaaaaagagaatggaacttaagaagaacccaaggccaatcgagaaaacaacaaggatgaaaagtaaaggctgacgcatggagtacagaacacagcacccattcattcctcttcttcaatcgaggtgagcgcaagcacataactcaatgacactgcctactgtgtagcagaatagagggagcaacgaataggaagagaacttgtattgggtctcatgatcatggccatgtagggaggaacacatgtttggtctt

SEQ ID NO: 75193 - DNA, 425 bp, Oryza sativa
agcctacctgaaagtttgtcttgtggacactggaaagttcacaatgctgacgatcttcaagacagattaaatatgcccaaaataacttcattttgctttttttgcaagtggtcatctgctctctcttttttgcaattcaaagcttcttgcaattattttaaaaatcacgtgatgcttttgttcgaaacaaaagcattttctcaagtttcaaaaacatttctttgttccagcatatctcttcacctcatctatctctaacagtatacttgacaggtatgacctccttcataactcacatctcaaacttaatggtttgagtgatctcttcagagtttctcaggtaaattaaatatgtatcgcactcttaaaatgtacctcgcacttaaatgtgtgtagaaccacagatatacagctgctcctgtgta

SEQ ID NO: 75194 - DNA, 213 bp, Oryza sativa
atgtcataagaagagctagtattgaaaatgaatcgctaccgtttggtgattggtttaaccacatttattcattgaaatcagaaggttcaagaaaacaaactccgaagaaaagaatcattcttgcttaacaacaaactatggagaaagcatgaaagaggatgcaaaattataatattaaatatgtcctactggaccagttgtaagataacattc

SEQ ID NO: 75195 - DNA, 426 bp, Oryza sativa
  unsure (1)..(426): unsure at all n locations
agcttaatctcacatatgctggtagctatgtgccacacaagaatagtgtgggtgcatgtctgaagctcaaagcatgcccatcgggaacttttccttttatcatcaagcagtgagataaccaccttgggcagatggccggccgtaaagtctatagagttgagtttctccaggatggcatgtttgacacattctggaatatcaatggggtagctgagatctgccccattgtccttctttggaaccattcctgtagatatcttgtgaatcagattccaaattctgggtctgtcgtcatatgactccaggaagacatattgatcgatntgtccatgccacctgttagcaattatgttagatttgaagaaggataatattatgttctccatgcagcggtttctggtacgctcatcatcccatcgcgcatac

SEQ ID NO: 75196 - DNA, 192 bp, Oryza sativa
agtgttgaggtgttcgcgaaggctacgctttatttgatgaacccataattggagactctctctgattcgatgcaggatgtatgcaacgcttgtttccgtgagctgaagatcagctggttgcgtgctttccagagaccgtgcgaacaagcagcaaagcatgcacgccatcccggtttctggtgttctggcaag

SEQ ID NO: 75197 - DNA, 419 bp, Oryza sativa
  unsure (1)..(419): unsure at all n locations
agcttatgttatttctaatttaaaatggtgcagtgagtactgcaacagtacagagggttcttcaatggtacaatttacctcaacatggaacaaaaaattcatcaactggtttaaagagaaggtaatatttatataattacatatatggaataaaccgtttcaaatatgtatatttgttgatgttatttttttaatcttnttgccctgtagatatatcagcagcaccagcatgataagagtgaggtcatggaagaccttttgtcattgtcgcgtggtctgctgaagaatataacatgctttactggatatgacatgaatgggttcagatatcgcacagaaagacgggacagccacaggtgtacacaaaacagtggtgtgatggttcttggtgatgatgtggaatattatggagttttgac

SEQ ID NO: 75198 - DNA, 174 bp, Oryza sativa
ctccttgagaaatgtatttaagtacatgattctacagcgaaatgtgaagggaatctagcaaaacaaatgtgtgtgggctgccttgctagttgggtctaaacagtgcacagaagtaattcccctcttttggttgtttgcgtctaattcctcaatccggttgcacctatattgcaa

SEQ ID NO: 75199 - DNA, 423 bp, Oryza sativa
  unsure (1)..(423): unsure at all n locations
agcttttatgcattggctaaccttttctgctccatgcaatggtaatggaaaaatcacagttgccagctaagaattaaccggacaatatgaatatacatatatgaaatttgcgattcttctttatatagagtccttttgaaggataaccttaccctgcatcttactctgccactgaggccactacccatcttaagaggatatgattntaatctgcgttgtgcaggtatagatgcatgtacatttctaaaaaaaacatattttagttaaaatacttggcatggatattttagttaatctgcgttgtgcagatattttagttaaaacatatttacaatccgttggccatgtttttgttaaaactcttcatatatacttttaattcaattttcgttgggtatctcctcttttcagcaaatgtgagca

SEQ ID NO: 75200 - DNA, 369 bp, Oryza sativa
  unsure (1)..(369): unsure at all n locations
atcttgtgtctttatcgaagatcgtggcttgaacgatatattcaaagacatcaactctaatgcccacttcgcaattcatccgttcgcttcgtggttatgaagtatatccccgagtggaagcgatgtgaccaccgtgaccgattgactttgaaagtagtgagataatttcctgacggtgattaagacaccatataataacttttgaacctgaggatatcttgtcttggagttggccaaaacctcgctaacgaaataaattggtcgctggactttttgaatatgggcttcctcttcacgctcgacaaccaggaccgtgctcacaacctgngaggtcgccgacacatataacagtagcggctcttgtggatg

SEQ ID NO: 75201 - DNA, 333 bp, Oryza sativa
acctatgtaatagttgatgtaatttatattaaagcaaatgatcctcccccccttcttgatagttcacataccagtgcccctaaatttccatcctggatttgccctaagtcaacattatcaaccttggtacttcaccggtcaccaccgtctgaatatatccatcttacaaggcaccctctgatatattttacgtaatgagttatatctcatctctctattccatgttctattctagctaatattaatattaatccttcatttttatgacaccattcttcacctcaactgcaaatatatatgttttaaaacggtcataacgttttttatacgtat

SEQ ID NO: 75202 - DNA, 425 bp, Oryza sativa
  unsure (1)..(425): unsure at all n locations
agctnnttgtgctctgatatggaaagtgactgggntgggccgttggggtatgatcactcaagccagacacatgaagtgtagaagtgttctactgggcaatggctttgctcccttgcaatttagtgaccattcaagccaaggaagtttgagggatatccttattgagggcgcttagcataacttacaacatgaagaaatattgtactcatgtggatattataatcaatcccagaagtaactagaataacaagtttggtatgatagctaagagaagacaaatatcaccaagaactaatcaaaacagatggacatgatttatgcttatcaatatagagtccaaacagcaaacaagtgcaaagcttttaaataacatcatcagcatgggctcaaaatgctcatacccttaanacaacattattacaaaa

SEQ ID NO: 75203 - DNA, 235 bp, Oryza sativa
ctttgaactaaagcaggagcaacatcctccatgatatattttcttttaaattttctattgtagaaatagaatatcccaaaacttatttctaaatctaaagattctttattcacactatagttagacggcgttgcaaaagttctatctagttagattggcacgtggtaagacaacactaccacgtccaatgattaatggtggtgtggcaatgttgtatccccacgccaatctgatg

SEQ ID NO: 75204 - DNA, 416 bp, Oryza sativa
  unsure (1)..(416): unsure at all n locations
agcttgaataagttgtgctaagtagaaaaacacaaaacatagcttttcggtcaaaatatttccccattatctttgttaaatttgggtcaccttgaataagtttcgccaagtaggaaaacacacagacacacgaagattttttttttatcgaaatagtttcccaatttacctccaaatattcagacgcttatggctcagattgtatcaagatttatatatcacatgaatcttacctttctctagcccctctcctccccacaacacatgtgaggcgagccccctctccgcctgtggccccactaacactggtgaggccttcacaaataaatcttttgtcttttcatgatgtctacttgtggtaagaacttcaccanatccattacaattagatcatgccgagtattcttttgaaaaaa

SEQ ID NO: 75205 - DNA, 220 bp, Oryza sativa
  unsure (1)..(220): unsure at all n locations
actcagctttgctncaatcagcacacaaaacagatcataactttatcatcaacaattgctatcaagttcaacccatcatacacatgttgaactccatacacacgtataaaagattgcacatcagcggatcacacaaccacaacaaatttgcataatcaacaacttcctaggcagaactattgagcatcaagcagaaccttggagatgatctagctcttct

SEQ ID NO: 75206 - DNA, 409 bp, Oryza sativa
  unsure (1)..(409): unsure at all n locations
gtattgcatctgactctcttacattctgtagctggtgtagctctaagtgaccgccaatgtctaatttctgcagctctccaacattactgcatttatagccagaacccactacaaaacaagtgagtgtctgtagggaaatgagttttctgaaatccggaggcatgtgcttcacattcaaacaaccatgagtgtataggtgaccgagcgaagtcatgtacttcatttgtttaggaagtctacggaggcaataacaatcagataggtttaacgtcngtaaactatatagaatgcttatttctccgggaagtgcttttatataagtttttgagagatccatgtaccttatatgatgtagaatctttgtgtntagttggatcaaccgcatctctttactcatgtttaatgctcc

SEQ ID NO: 75207 - DNA, 301 bp, Oryza sativa
  unsure (1)..(301): unsure at all n locations
tanctttcccattagccgagagttggctactgatttgattctccagtcgctccctcccagctgtgagccgttcataatgaatttcaacatgaacaacctgaacatgtgttaacagctaaatttggtagcatctgtgtcaggaaagaggatttgatcaaagcggagtcggaggcagagatcgagtttganacagagcacgaatccgctgaagtccacaatcgctatataatatcggttatggctctgtaagtaaagctacgatctcaaaacttgcctacttacttcttactattgatctcta

SEQ ID NO: 75208 - DNA, 429 bp, Oryza sativa
  unsure (1)..(429): unsure at all n locations
agcttttgtcttgtttgatgctgatgaatctattntgatcatatgcagggacttgtcttacaacaacttgagcggtccacttccaccgaacattggatccttgagtaaccttgaaagcctgtaagcacaaaattaaatgtttatgttagctcattgttgggtgattaattcataacaaagtctgaagctggattatncaaaagtcataaactgatcatttgattagaacaaagattccatatcatgattntaatataatatcaattttaatttcattaatgaatcgcttctctcactttctcttgtgcatgacangagcgttgttggctgccaattttctggtgacataccaaaagaactcagccaactcccaaagctgcggttcctggtaagatctcaatgacttggaaatatngttaatgatctcat

SEQ ID NO: 75209 - DNA, 415 bp, Oryza sativa
  unsure (1)..(415): unsure at all n locations
agcttattgttntctcgtttttcagtcgttgatgttggcccttcacaagttcagagttaccgaggagcacaagaaatattcgatcgatgatgcagagccccttgtgttgtttggccttaactgtggaatgttctcatcacctgctgtaagtatatttaccttttatcttggtttgtcatctcaacactatttaccttttatcttggtttgtcatctcaacactatttaccttttatcttggtttgtcatctcaacatgtatacacggacggtcttttaaagaagctaaaagtcaccagtatgtttcaagattaccttataatggtttacgccactgaatatattcactcttaagcctgaaacacttctaaatcatcttttatgttccagtatttataacaaataaaaactgtcat

SEQ ID NO: 75210 - DNA, 213 bp, Oryza sativa
  unsure (1)..(213): unsure at all n locations
aaactcangcttggcatccttgnactcacttgtgccctcatggatctccgtcttcttgntccaaatctcatatgcggactcaaggttgctcactctatcgaactcctctaggctcaaagagttgaacaaagcattcatggcttgagcattgagttggagattgctgtgatcaatctctgtcaaggcgtgccagngatatccaaccctacatcc

SEQ ID NO: 75211 - DNA, 293 bp, Oryza sativa
tatcaccttactacgaaaactctgggccatgcgatgacgcccaacaattctaccgaggaacaagatctggccagttcttttcaacacaatggaccgattatctaattgtatgataatgatttagagggatcagatcgaataattattacaaaaacggaaagtcttatatatatatatatatatatgaatctgcatatatctagaaacttatgtagcgatacatctatatatatcatcagatatcgctcaccatcagaattacgacgcgacggcccccgtgtaattttgtctat

SEQ ID NO: 75212 - DNA, 387 bp, Oryza sativa
tgctttttattatttacaacaaaatttaaagataattatgattgctatggattacaccaatggcaaacgaagtgattcatacattcagatgaacactctatctgctatacaaattctcagcttatatagcctctaaagacgaagatccatcattatatgctattgtcataaagaagaaagcctctattgatagtgttatggggatctgtaccactaaatgtctcttttaagagagctctagtatgacataatctaacactatggaataaattgagagcgatcatagcttatatatagtaggatgattctgatgattgctctagatggaactatcatgaaagtaaacattatatacgaaagtgaatgcacttacgcttattagcaatg

SEQ ID NO: 75213 - DNA, 426 bp, Oryza sativa
  unsure (1)..(426): unsure at all n locations
agcttcacttgtccgcacattcacattcgcgaaggccctgcatcgtcgtcagctttgtgggggtttgcccgaggaggcaattcgccgttgtaaacccggttcgcccgcccagccgcttgtcgtgttagcaactggctatactcgacgaccgacacgtcgccgatcatcctgcgggcctcgttttcagcctggtcgagggtcaacgctgcaaaagtaaagtgtgtagctatgttaacagttagacaaggcaagataacaaagcacagcagtgtatggcaagagaacagtcttactgtctgtcccttcaggaagaatcangttcggcaaaccgtcaacctcttcgccttgatcaactgtaacttgccatgactgggagaggggaaagatgcgaagcatacagaattcctccaccaagtcacggcagct

SEQ ID NO: 75214 - DNA, 214 bp, Oryza sativa
agtgtgtactgcgaaaaagattaagattggcctaatcacccacttgcctacaaaaagctaatcctaagacatgaagcatactaaatatgctgtacaattggctagccaaaaatcctcaccccctaaatatcgtaacattaaattaacatgtcaccactgtacacattgtatccaccatcgaagaaatcactcatgtactcctctatctttctct

SEQ ID NO: 75215 - DNA, 394 bp, Oryza sativa
  unsure (1)..(394): unsure at all n locations
agcttcaccattntaactgaattacatatgtcaccaacctataatcaaaccgaccttttaatagaatctagcttttatgtgctacataatgcatttattagaaggataaaaaacaattacccccattttctttcacaaatttgcctataaacccctataccataacacggggcagcttacaatcaatggaattataaccccagctggtgtttcggtggcaggttgccacatgataaattacggtgtgatattgactttggcccacaaaagcaaacaaaaagaactttgctttgttgtttttcacaatcacaaccacactagcatgcttaatagccagttaacagaggtagaccagatagctatggtggtgcggaagcaacagcatgtaacgaag

SEQ ID NO: 75216 - DNA, 419 bp, Oryza sativa
agctctggtatcattgtcaggcccctctgtgagaacccttgaacctctatcactcacatgcatgcacgcatttagcgagtacatggccgttgacacacatgcaccgtcgcccaaagataccttccgctcggactcgacggtagcgcaactccggtcaccaacgaccgataaaagtataggaatggaatcgcaggaacattctcttcattatgtcttttggtcgcacccccaaccaagtcaccgtttgtcgccggcgccagcgagcagaggtgccgctcatggcggctctactgctggatcgatagagaaggaatcatgacttcactttgaagatttaacaaattatacggtctgttatgcaaagatacaatacacacaacactgttgcacgacctactcgtaattatataagaatatga

SEQ ID NO: 75217 - DNA, 247 bp, Oryza sativa
acaccaagtgtcacgtgctccgaatggctctacatctctacctgataaagattctgaacacttgttccaacctggactttaaagcactggtacttcagtacatgcccaagggtagcttaaaagcactcctgcactcataacaagggaagcaattatgctttctcgagaggttggatattatgctagatgtgtcaatggcaatggaatacctgcattatgagcactatgacgtggttttacacctgca

SEQ ID NO: 75218 - DNA, 207 bp, Oryza sativa
actcagcttatggctctagacaggagccgcctccgcttctaccctctcccatgcttctgcccggctccagcccttcctatgctcccccttcgcgctcctttgtgctcccaccaccgatgccctcctgctcctgcattgtcgccgccggcgcgtcgcccgtcaccggccgccggacctcctcctcttccgccttgccccgccggtatt

SEQ ID NO: 75219 - DNA, 395 bp, Oryza sativa
agcttgctgttacacccaatgaaaattggggatttgttaccacagcttttagaatgatttattaaggaaaagataacatttttttctctcaaattcaggaacattagcactaggtgtttatatgataatgctgtatgatgaacagatgtagcctcttgaatctagattagttttgttgtcagacttatagttgctttcaataatatctgaaatggatgctgaattgataaatatcaagagggcgtaactataaaataaatcagaaaagatcatatttctacctgtatggttaaacctagatcaatgacaccatgtttcaacctttctcgaaacgcttcaagccctttccttgagatgaagctaaaccggtgcacgtcaaggtctatctcaaagta

SEQ ID NO: 75220 - DNA, 256 bp, Oryza sativa
  unsure (1)..(256): unsure at all n locations
acaccatnnaaactcacgcttaatatcatacacagatgtcataatacaatattgcatgaatatcaactggcagaatcttagcggtagaacaatagaggataaattgccaaacttgtcattgtcttctttttccaactcaatctactatttactatatcatatgaaaacatctacctgtaaaagttgcctcccatactatgttcaaccaaatttgtattaactattatactctctccgtttcattacatacgctttc

SEQ ID NO: 75221 - DNA, 321 bp, Oryza sativa
  unsure (1)..(321): unsure at all n locations
agcttgtgttatcatgcataacatgattattgcagatgacggacatatcgattgagaagaaccgttcctcataggaggagaaaatgtcatagtgtnccacgatgaaatacctgatcgtgatgatgttatccagacgcacaaaaaaataagggacgacgaaactcactatcggttactagaagacctagtggagcacttgagcgaacattatcctgataaatattgaggtttatttatatgtctngattccatgtaataaatagtgtacatattgagaggatttgcacaatcattgtaatgtgctcttcgagtattgaataa

SEQ ID NO: 75222 - DNA, 369 bp, Oryza sativa
ctcttgcgatatggcgctggtggtggcagcgaggctggctgctgtgctggacttggaacaatagcattcgacgccgacgacccggagctccacgtgggcgcgccagtgtagaacttcttcgtatcgtacctatgtaaaggctctaaccttttcagcctataaaatttaaggacttgatctaaaataggggtggatacttggctgaacttttgttcatttttgatggtggacctaaaaatattgagggttgctgtacatataatcccgttgggacagaatgataccggtcacgtatctggttctgatacccttgagttatcatatcctaatagtgatacctaaccagtatcacgtgattcatcactttgc

SEQ ID NO: 75223 - DNA, 275 bp, Oryza sativa
tctataaaccatctgcaaccctctagctcaacttaagtgtatatgtcctcctgctgcacattagtggaccaaggggagtatatagatatgtgtggttagggtaacaaaaccaaaaaaacttctgctttgcgcgcaataaaaatatatataaattctacagtttggactctattggaaaatctatgacaacactgactatatcctccaacacttcacacacaatctgtgatctgatctgttttcatttcaacaaccaatgctgagatgctctgatg

SEQ ID NO: 75224 - DNA, 414 bp, Oryza sativa
  unsure (1)..(414): unsure at all n locations
agctntattgttttacaccttttaagatgcattgtaccaactcctaaaaagttaagtaactgcggtataaaaggattttaaagtattgggcacttgatcacgcgcactttggcctaagcaaaaagggcctaagtccctaaaagaacgtgacaggccacacctgaaaatataggttgcagacatattaggcctaggccaaaaaatatgccttcgacaccctttaaaggatgacgcatgtaacatgctcccgagtaataaatcttccaggtattatagaccaagcttagctcatatgaatagcttctgatctgagtgattatcccttatgggatactccaaaatagatgtaacaattgaatcccgactggccacgtattcgggtgtaaccctatggngaatataaaaagtcagtct

SEQ ID NO: 75225 - DNA, 451 bp, Oryza sativa
  unsure (1)..(451): unsure at all n locations
cttcctaggtgttgattatcagttaagtgtattgatacttgtctttggtagtagcatctttagatgtaaacagcttgagggatcgacactcttttcttgaagccgagctatatatattccaaattgtagttcttaattactatctgccacttcaatagttaatcgaaaatggagaacgatctataagtttcatatatgtgtgtgttatatgccttgcgcacaaactgtagatttccaaactggaaaatgagaatgatcatgtgatagcgtgtatcatgctaatggatgatcatgtttatagttatggttcttgcgcctgaccttgataacttgatgataattaatggtttcactttgcttacatgattganaacacattcttacaaccagtgatattttccacattaggttaataagtgttaagttaaagttggcacaatatccattgagt

SEQ ID NO: 75226 - DNA, 415 bp, Oryza sativa
ttcttttataaaacgactctccgaacacgcccttgcttcctcatggtttgaagaatacacgaaatatatgcttcctgaattcatccttgcaggcattgctctcatgctggccttttgtccagctcttacagaacttgaggaaccagaatatacctaacgtgctgctatataaacaataaagcttgatgttctaaccccccttatttcacgctaatttctctgactacttgttgcattttatgctggttacccaacactgaatgcatttattgagttcatctctcaattcgacgcgctcgatgattcaaaagttaagaaagacgagaagtctgctacaatagcttcaaaatcagatatatccttcatgttcgacacagttctgagaaattttactccagatgtgccagctggaaca

SEQ ID NO: 75227 - DNA, 381 bp, Oryza sativa
  unsure (1)..(381): unsure at all n locations
agcttaatctcattgtcatcatgtcatggatgaaataatccctgtaaattgaacttttccagctatgcccatctctattcatgctatcaagcaatcaagtttccattcgacgaattcagagtgtatgatgagttttgcagtcataaaccctttatattactttcaaggggatcaaatgactttgccaagccaatgtatggcttattacattttgttttcctgagcatcccggtgtatttacaaagggtacacaaagaaattcccgaagcaacgagcggagggttcatctaactctctaaattctctcactcagtacatgacctttttcttctgtttttcgcaacttacccctttattcttgcattacagatntacagacta

SEQ ID NO: 75228 - DNA, 459 bp, Oryza sativa
  unsure (1)..(459): unsure at all n locations
tgcggcagtgcaaacggatgtgatcaagctctccacactcttagcaacaaacttgacctcctcttttcctgaacctgacacaattctagctcgagacaacttgttaatagccaaagccaagtcctcctcctcgaattgctcaagttgatcatcaaacatgacattaatagtagaaagagcagtataagtcgacgaagaagcaccaatatccaaagaagtcaaaggagaaactaaagtactagatttagaataagctttacaagaaagaatattatctcaagagttttgagtttagtgtaaagtgaatctaaagttaaagtggatatgtcaacagactcttgaatagatgtaactntcatcttccaaacaaacatatcaagaccattcaaaaagtgacaagaaatttcaaattgtgagtaataagtataataagatgtatcaatagatctaagaatactc

SEQ ID NO: 75229 - DNA, 384 bp, Oryza sativa
  unsure (1)..(384): unsure at all n locations
agcttctctcccttaaaaaacgctcatacaactttaagaagaaaaacatactggcattaagacttaacattgtggtagtgtaattagtaagcattcacatgaaaaatcagttgcatgacactggtaatattaaatcgcaagaaaagctgaaacacacatgcaggagcaaaaccaaaaaaaaaagagcaacaaacaggaactaagtgatcttgtaagtatcacgtcacacattttcatccccagccaaggtaaagccatcctcagagaatggagcaacaacatgttgatcaccgttgtcttcgttagcataagaagtcgatggtccagcaacctgctcttcaccagaggactctctaacatggaatgtccgcanattacctgagt

SEQ ID NO: 75230 - DNA, 353 bp, Oryza sativa
  unsure (1)..(353): unsure at all n locations
ctaagcttctgtgangtctggaacgtaaaaccgctctttgtttatttcaatctggatgcaaagagttcggtcctttcccatacaagactaatttcttctaataatacacctatatcaaaataatccggtatatattctcaccggattgtgggaccttttcagctaatctatatttctatatatgtattgaccctggttaaattagaaatcgacatttaacttcctttgtctgatatacaagcaaacttgttctggcgtactctcttttttatcggcgaaattgaactcgacaaccatggtgatgatgagctgcaagaggaggaaggtttcaccaaccagtggtgctggtgcac

SEQ ID NO: 75231 - DNA, 344 bp, Oryza sativa
agcttgttggttcatcttatatatgaggatcccttggaataacatatgcggtcacaagaagccttcgcctccgcggaatatggaaaccagcatcagagcgagccgaggatgactcatgatggacaacaagaggcgcctgcgggtataggcgaagagacatcatgaagatgcacccaaagtaatgaaacgtccggaggtcatgtgcctctaagcatcgaacaggctgaccgatgaacgcacccatcgcataacgagctcttatcataacattgggattgtgcaaagcagagacatcgcccactcaatagtctctgttgacgtacccattccgctccaagcgaact

SEQ ID NO: 75232 - DNA, 373 bp, Oryza sativa
  unsure (1)..(373): unsure at all n locations
ctcaagctttgatagnttccctcaaattcaaattatcagccgcttatattcttgttgtcttggtgaaactaaccggcgggtaaaactcttgttattcctaacccccgccgagttagtccggtcttgcttcattgtgtagaatgatgaggcgaatgtttcgtctggtcaagggggccggctcttcatcaagtcatcatgaccgtgtcaggacttcgttattcactgatggtctcatgggaaacgccgaagctccactacgacttctgaaccaacctgacctcaaccttgtcagtgatcgggagagacaagcctactacatgctgagcgaccgggagtttgctcacaccccagattactcaccggagctgctgaa

SEQ ID NO: 75233 - DNA, 369 bp, Oryza sativa
ttcttgttttaaataaatataaaaactccgggccacagttttccgaaatatccaatgcacctaaaatctttatttctgttctcttctattggaggtccacctgttcctggcccgtacaagggcgtggggcgacatggcagtatggttcgaaattccagagcgagatttccgacaatttggttctatcggacctccaatacgatatcatttcggctgagatgtctaattctttatttgttaatttggtaatcttttattcaaatttgatagattttgtttaacattcaaataatttcggaccgaaatttttaacatttcagtatatcggcacacccgatacaaatgccaaaatcgaaatatttaggcctg

SEQ ID NO: 75234 - DNA, 459 bp, Oryza sativa
tgttgaactcttcccagcttctagggctctatctgagccgaagatcttttttgattcccttcactaatctcctcagaagatacatccccaaaggatggttgcttgtatagatccttgatagcaggaatcatctcataagccggaggtttcccggtaccatcacaagtatctgccacatattgatcttgttgcctccttgctgcaaccactgcattcttctgaacttcctcctctgtcacggatagcttccctgcttgatccgccaattgatcatcaatcttgtggtctccctccttttccctgaattcaaaaccatcatatgcatctacccttggtagcacctcctcgttccaccaatcacattttttcttcctcacaaaagaagagctcgcactgcctgcttcccgaaaagacagattacgagctacaccagaagactgacccgcctttaccttgctg

SEQ ID NO: 75235 - DNA, 408 bp, Oryza sativa
  unsure (1)..(408): unsure at all n locations
agctttcaccgtcttatgtcacactcgcgtagctgtatttttatattatggacatcgtgtattcatgttgtttagcacttaagcacataattattatgatgggtcgtttattgattattgtattattgttccttgcattgctaactcgatgttgtattgattgcatacacttataacatccgataaatntaatccatttccgaactgattccgcatcatttcccacatccgaaacaaatccgctctgcatccgtacgctatccgcacccgctccgaatctgcttaaaaaatatggtttaggatatggtatgactactatccgaccgaatccgctccgttttcacccttaaaggtggttgtgtngactcgagagaaaatgagaggatangtatgaatttntttatttac

SEQ ID NO: 75236 - DNA, 450 bp, Oryza sativa
  unsure (1)..(450): unsure at all n locations
tcagacgtactacaccatgtgcggtcgtatggtttctatggctaatgggatatgatatgtgggatacgaaaatggaaatggattaatggctaagattaaatgaggtgtgacgaatggatggctacgatgtaatattgtcttttggagggtgggatattattttccaatcctatttgccaaacaaagccgaaaggcgatcgaatgaatcaaacgatcgatatgatccaattgtgacttggataacaagcccctcggtcggtctcggtggataataataaggacacgcctacaaatcaagcgccttatttttattttntttaaaaaagccacgcgctgtttcaccaagtggatcaaaaatctttcacttaatagatccgaaatattttaatcttttaataagctgaaacacaaccaaatcacctcataaaacattttgttacaacgtatgaa

SEQ ID NO: 75237 - DNA, 414 bp, Oryza sativa
agcttcttctttttccagtatcaagcctgaacaaaaatttaacagaattaagtatcgtcaactattcatcataattatactaaaattatgacagtgccatttcgagcaacagttgacgtacaaaaatccactacctagtaagtctcatgaaatattatcaatgcggtctctcatgaattacatgcctgtaaatactgtaagagattccaagtaataaatcaaacatttcccgcgccacaacgccaacaaataccaaaagaaaaagtagttttcatgccaaaaatctcctttctcacaactcattatccttctcaaaccaaagaattcttccaccataatttctacaagttgcgaacaggaacaaagagaaatcgagcatatggaatcagaaaacaaaaattcaattctacagat

SEQ ID NO: 75238 - DNA, 411 bp, Oryza sativa
  unsure (1)..(411): unsure at all n locations
aacataaatntaagctgggtgatggagatgcccaacctatgcatcttggcatcttcataaactcgttccgtgacaccgcccgcatcgctgttgccgctgccacaacgaaagaagaagaagacatgccattgtcaccgggccacgccgccaccgaagcagccaacgcgaccggggccatatggactctggacaaatcagctgatgagacttgagacacgctcgacatgaggagcttatgggcgtatgaggactacaagacgtcacggttgccccggatggtgctcacgtggcccttcatgaggctgcgggaagatggtggttgtctctacttcttagggcctgttactttgttgccaaaaaaaccttacaaaattcggctatgtcattttggaatgccaaattttttaacta

SEQ ID NO: 75239 - DNA, 299 bp, Oryza sativa
agcttgcaatagcttaaagatttgggatcgatgaggaggaaggtttccaagaaattgagatgagacaatggctacaggatatccgagagagtgggtatgtaccatggttataatagctcagatactcatgcaggtactacttgttgtggtttcctctattacatgtcgtgagtacaaaacgtttgggcaagatttgtatatgtatattttgacataaaggcatctgcgccactgcctaattaaggctgagttctttccccaactttctcaactcacctccctcgttttttcacgcgcac

SEQ ID NO: 75240 - DNA, 417 bp, Oryza sativa
tttattgtttaaccaagaacaactggcaagtactctctaagggcatgctgtaactctgaaacatccgaaacatccgcgcaatcttcatatgtagtcagcaaccgaacacaacaaaatcaaagaacaattgtcagtatcctaacattacaaaatgttcagaatccagtagccagagaggcagtgacatacagatatcttcagagagcgcgacaacgcggtctctgaactttgagaggcggtcgacgagctccttggatactagtcctctgagtggatgggcaacatcactgtccaccggaatgcgaattgacggcacgaatatggcaacctcctgtatgacgctccggcgctattttccctttccctctaccttgcatttcttaaggattgatgcaacacaccccatctctgtaagtg

SEQ ID NO: 75241 - DNA, 421 bp, Oryza sativa
  unsure (1)..(421): unsure at all n locations
agcttgaataacantatcagcagcataaattcaaaccagatgatagcagtgacaccgacgagggcagtggactgatctgagaagactctcaaacacgagatttagagtggtcctgcaaatgtcccattctccctctgttcattccacttctcaacctgagacaggaaaagcttatgatgaccaaggaaaaaaaaactaaactgtggttcttttaacagctaaagttcctagtcatgcaccacagtaataacttgtaaaacacacacacacacacagagggcgagagaatgccgttcagctaagaactaacagacaataaaaaaatgcagagaaatgaaatcaaaggtataacattagttgaacaattgatagccagagcacatgatacagccagctgaaaaataaggttttaaagcacatg

SEQ ID NO: 75242 - DNA, 448 bp, Oryza sativa
tgatcagtaccagatccttaagtatccccttaccactgaattcgtttgaagaagatcgaagacaacaacactctggtcttcattgttgaccttaaggctgacaagaagaagatcaaggctgctgtcaagaagatgtacgacatccaggcaaagaaagtgaacactctgatcaggttagcactttccttcatacttcattttatcgcttgatttgctaggtagtgtagttaactgaccctacttgtcttccaggcctgatgggaagaagaaggcttacgtgaagctgacaccagactacgatgctctcgacgtggccaacaagattggcatcatctaagttagggtgctgcagtagtcttttgtgtcctggtctctatgtgattggagttttgtagctattacttagcgaatgcctcagtggctaagttatcactattttgctgcacac

SEQ ID NO: 75243 - DNA, 344 bp, Oryza sativa
aattaatgcctgtacatgctttgactacattgtgtattctttagaacatatgtctacgtgtgtttatcgatataatgaacattacgtgcgtaatactgtttttcttctgacgagatcagaaggcacggaagctttattggattctcgaggtatacttacggaagtatgacctgtatactgtacatacgtttcagcagaatggaattataatggtaaaaatatctccatttaatctaacagcctaaaatatcggttccactgacaggacgtatctaggattaaaataagtgagtccgactagtttctctaaaccacaaatcaacgaaggacattatcgatcctcg

SEQ ID NO: 75244 - DNA, 383 bp, Oryza sativa
  unsure (1)..(383): unsure at all n locations
ctcgagaactgagaaatctaccgggtctagtcatcataaagaagcagagcaaaacgacagttttacaagaagggaagatacttgcgctgattttattgaagcacttcgcttgattgatcaggcacttctntttgaaacaagcataagtttttttctcatgaactcttcctgaactaagacaatttactatatttttaagatatatcatcagtacattctatcagatactctattaaaaaaatctcatacgtctttgtgtttcatactacactgcattaattattggcatttcgtccttcagatctacttcacatataataagaagaaacatatttcaaccaaaaaatcattatgcgacttgattaggtacatatactcaagtt

SEQ ID NO: 75245 - DNA, 398 bp, Oryza sativa
ctatgccgtgagaccggaaattgttagtgaatcttcttcctgttagtcctattgatgttgacaaaaagaaagggaaaagtgttattattagggatcctcggccaaagaataggatcaacaatgcgaaggccgaagatcataaagttgcaaaggatgagtcatctagttcccaaaagaataaaaagccgaagctcacttttgagatgcttatggctaagtacgagaaaggattagccgatcaacgatctgataaccaaactagtgattctaaaagaccaagatcatctcgtatgaagagatttggtcaaacatcaaagcaatcgaagccatcaaccataccaacttcatacaaactctcgtgtgtgatgccacggtatccatatttaatgtcactatat

SEQ ID NO: 75246 - DNA, 416 bp, Oryza sativa
  unsure (1)..(416): unsure at all n locations
atcttgtagcggcaaacggtggctcgtttgagggtgcgaccaanagacaaaatgaagatcatgctattgcgattccattcctcttcttttcttggtcagtggacatcggagtaacgccggcggcgagtccgagcggcggctgtgcttaagctgctactgcatgttgagttggtgctcaattctaagtgaatgaaatgcatgaatgcaatcctatgggctcaagggtgctcaccgaaccttgaacgaggcgccggaaagtctggacagcggcagcggagaagaagatggtccggcgacggtgtagagctccgggaagacggcaacggctcgatccactcatcgaattgacatgcatgtgttntcatggggttagtgaggtcccacggatggtgtatacgcgaagaatcggacaatgg

SEQ ID NO: 75247 - DNA, 416 bp, Oryza sativa
  unsure (1)..(416): unsure at all n locations
atcttgcttatgaaccacatcgcaatcaacagaatctgcatatgagccaatggaaaacgaaatcctacaaacttgtgttacctttgctcttccggaatcgtttaaccactgaatatggtaagggtgtggatgtgtacgtgtagtcaagccaagcttcttgaccaaatcagaactcacgaagttgttgcagcttcctccatcaatgatcacacgtgcacgacggttgttgatgacaaagaaaatctgaaacaaattatggcgttgcaacctgtcatgctgctgtacctgcgtgctgagcacccgctgcacaatgatggttctgtagtccgttgtgtcatcacgaccaaagcttcgccatcctcatcctcaacttcttcttccttctcttnctcttccacgtcggaggtggtgatgta

SEQ ID NO: 75248 - DNA, 340 bp, Oryza sativa
gttcctatcgaaagagaccacttggcccgtgagttcttatgaggcgatcgacgaagactttctcaaagacatggtgaggggatcaactaccattgtgagcatgagcggttaagagatatggagctttctttcacagccattcgaattaactccccatccttaactattcaatggctcatgaaaaaagccatggtgaattgtcactataatccccttgttggtgcctacaatatattcccagcctctgtcttaactatcttatgggacagactggtagcacccatatacaaaacctttcgaagttcctcatgtcttatgataaaagggtatgggattttat

SEQ ID NO: 75249 - DNA, 420 bp, Oryza sativa
cagcgtgcaatcttgtgcttactattgtatcagaaaagctagacttcaattcgatcaattcaagctgtcccagctggtcagtggcagagcatactaattaagcaggacaatgcatgctgccatgcttgcatagttaagctataataattaagttgcatgcatgtattttatgaagccgggatccatcacgaataatgaagccatgacccaccccgacatatgtacaattagcagctcagcagacaaggtcgccatggcttcatttgtgatcgtatatatgttatgcatttgaaattgggctgagtagaaaattatactgatgtgcaaatagtacgttccacagacaacacaagttcgtccatatggttatgagaaatttgagtagttaattaatttggtagcataattgttgaaaatata

SEQ ID NO: 75250 - DNA, 341 bp, Oryza sativa
gatctatcatcacaccaccgccaaatttgtcttcatcgaggccttaagctgtcgtgtaaaaattggattccgtgcaaactgatcacgttcgtaactttcggcttaaacatttggatcgttaaactttagatatatataaatactatatatagaaaatatttgaattcaaattcacatctgaatcgggatatcaacgctaggtctataaactttagatgtatagaaatactatatatgaaaaatatttgaattcatattcaaatatgaatcggatatttgaattccaattcacatttgaatcacacttcactcaaattcaaacttgaaccggatgtataaac

SEQ ID NO: 75251 - DNA, 329 bp, Oryza sativa
  unsure (1)..(329): unsure at all n locations
aagcttatacaatatgtggcaaagccggaccggtctgacacctcccttcgccgtgatcgagtcgacgtggctttcctgacccgtcgagatcgatcgagcggccatcgatctggtcgtccgtaattcatctactaaccgcttgcggctgcaggttcgcgcgcacgcacgcacgcgttgcatttgcctagtccttcgggttggtgtggcttctgaaaccgactcctcccccactcttctcccacgcaaatctgaaattgtgaagtgagcggtttgcctttaggcttatatatacggagaccttaacaccacgcanagagagagggaggaga

SEQ ID NO: 75252 - DNA, 458 bp, Oryza sativa
tagttaaggcaatggaacagtgtaagactgatggcagtcatatatgtcaggatatagcaataaagacatcagatactcatattctgacatcacagttcataaccaagaaaaacacggactcttccagtgcactgaaggaaacatgacgaacaggtacccagtacagacgaaggcagcaaacgtgacacaactgataacgccatagggagatcttggctagacgatgccatttgcctattgtcatcgagagcttggcatttccatggaacttacgcaggtgcacgggcagcagactggctgtggagctcgcacgggcgcctaagcatggtaagatcattgcgatcctggatgtcatgccagcactaacaagccccaagcacacgatagagttgaccgtcgtcgcgcacgaatcatgagagaaggacggcgaactgagtacagagctgaaaccgagatga

SEQ ID NO: 75253 - DNA, 365 bp, Oryza sativa
  unsure (1)..(365): unsure at all n locations
tatcttggcgcaaaaacagtatgatttcgccaagatatagatggaacgatattgatcacaaagatcaagtttagttaggcagataaaagggcaaccctactctaatgacatatattgtctttaccttgtattatgagacagaaaagaatttctataatacaaaagagatgtagctctcacatacaatggtatcccagtgtgctaccaacaagacttgtatgaaatatagtatgcattntaagatttcggatgttatgccaaactacattgataaggaagcagtgttacattccttggttttcattatccatatatcntttagccaaaaaaagtaattatcagaacaacacanagaatataatctg

SEQ ID NO: 75254 - DNA, 431 bp, Oryza sativa
acttgaggacttttcccacgtatactgatttttgataatcctttcaattgcatatttgctttcattgcatcttataaacttgaaaacaacataaaaatttgctcaatttaaaatacccaatagatatgataggtttgagtcatgctatgtaatacaagctagttctctgttttataccacattcacattttgcacaaccttgaccttaagtatgtttagtcatctgctttagtctaagtttttgacctagtaataaatgtgaatgcaagaatgccatgtttgatccctaccgagctccacatattaaacctgagagcaggaataaaaaaggcacaactggtgaggaattcaaattgatacacttggagagactgagtgaatcatttgaggaactttggtctctttttcaaaattattcgaacacttctgga

SEQ ID NO: 75255 - DNA, 431 bp, Oryza sativa
atgactcgtcccgggaaccctagaggcgactgcagcatgcaatctaattttatccttgagcatggaggagggcggcacaacacacttggagccagaatcaggcgactaggacaacacaatctttctaaacaacatcacgcacttctctgcgttgatcgtgcaatgcaagacaccacagcccttgatgatggggagagacctagtgtaagcattagcggagcggagggctccgaacgtacgggagtcggataacatcccgggagaaactgttcatcaataaacgccggcggtcaccgaagtaacgacctttgttggacttgacgccaacgagccatccctcgaacgagcccacgcagcagacgctgtcaccagacgccatcttcttcttcgtcttcggaagcgggacacggacacgcactcccatgatggac

SEQ ID NO: 75256 - DNA, 299 bp, Oryza sativa
tgtactaagtgcatttgagaaattatctagcttattgattaatttccataacagtgagatattttgctatggcaaggcaaaagatgtggagcatgagtacgtcaatattatttgggtgtgataccggggcttacccttttaaatacttaattagggattccaatgcatcacaagagaatcaacaataaggattggcacggtgtggaggagaggattccaaagaaactgagtagttggaaaggaaaatttctctcggtaggaggaaggttggtccttaacaatccacgtgtaagtagttt

SEQ ID NO: 75257 - DNA, 341 bp, Oryza sativa
agcttgttcacttttgctgggtcgtccttgggaacatgacaatgatgctacacaccatggtaggagtaataaatacactgttgtgcataatgggaagaaaattactttgctacctttgacccctgctgaaattgtagaagctgataaagagcgagctgctagtttgaaacttgatgaatctgaaaatcagcaagtggctaaatctgtttttccacctaaaaaagataagctttcacctagttctaaggttgagggaattaagttgaagggtggtgttatgcttgcaacgaaatgtgacattgctgaaatttcagatgatgatatgtgctatctcttgatat

SEQ ID NO: 75258 - DNA, 306 bp, Oryza sativa
tagcttacattgcgctggggtgggggttgtccaagacctttttttcttctggttttatggctgacaattgggatgatgaggatgattactatgacgactagtcacttggttcccgtgtacgaatacaaagatgacgtaccggttctcgagtaatcctgcagtctctcccgctgatgtcgcggcgaccgactccattggcattattgctatggtggtcgaaccaaccagtatacctctgcatgcgctgtacgacacattatgttcgggcggctgggcggtatcacagcccagcttatgctgggtgtc

SEQ ID NO: 75259 - DNA, 301 bp, Oryza sativa
agctttgttctattttttgaatctttgatgcatgataactgcccctcctaaacacacagttacatagatggaagtgaatgtgcaaaatccattcatcatatcgctattcctattcttaccataaagagggccacacttgcaattcttcatacgtgcttacatgccctcctagacatatactaattccatggatgggaagtgaatgtgctaaatccatttggaagcagcattggtaagttatggggtttgtacgcaagtgaatccacctaattgggttcatgtcctcaatttgaatggacaa

SEQ ID NO: 75260 - DNA, 334 bp, Oryza sativa
ttttaaatatagcctagctcacgggaacgctcacccattgaggctccttgcttagcatcagaacgcgagctgcgagttattacggacgcgtggaagcctcttctcaggcacgttccgacccgaagagagaagacgaagagcagagagaaccgaggcgaagattgccatcttgatacgagtatcgagctacgagctcgcatgcagaggaggtggcatgaaggtgataaccatggcgcacatcgtcatgatccagcgtcattctctgcatggcagcctcagcatatacacgccctaacggcagtagacacaacatggccctcaaccagagaacact

SEQ ID NO: 75261 - DNA, 386 bp, Oryza sativa
agcttggtcacttttgctgggtcgcccctgggaacatgacaatgatgcttcacaccatgggaggaagtataaatacacttttgggcataatgggaagaaaattactttgctacctttgacccctgctgaaattgtagaaactgataaagagcgagctgctagtttgaaacttgatgaatctggaaataacaagtggctaaatctggttttccacctaaaaaaagatagctttcacctagttctaaggttgagggaattaagttgaagggtggtgttatgcttgccacgaaatgtgacattgctgaaatttcagatgatgatatgtgctaattcttgatatgcaaacaagccttggtttctttagatgatattggctagtcgatacc

SEQ ID NO: 75262 - DNA, 454 bp, Oryza sativa
  unsure (1)..(454): unsure at all n locations
tgaaaccgtgcacacaaacacacagcagattgtatgtctgactctataatcagttcggtacaacaaagatctaatcatacttctatattcctttttatcaacagcttgaccatcttcatcaagattcaacacagctgtagaaccaattggtgttgaaattggcttgcaattctccatcttgaaccgtctcaaaagatccttcgtgtacttcgtttgatgcacaaaagtaccttgaggtgttcgcttaatttgtaatcctaaaaagtacgataactcactcatcatgctcatctcanattccctgcgcatagtctcagcacaatctacaaccaaagcgtgagtcgaacaaccaaagatgatatcatccacgtaaatctgaacgaacagttgattatcaccatgcttangaataaaaagcgttttgtcaacctttccgattgtaaaacctttcgca

SEQ ID NO: 75263 - DNA, 413 bp, Oryza sativa
agcttgcctccacattggttgataaagcgtaaataggcccatatgcatgaatgaagtattctgatccgagccaaaaggattgtggctcatacctgcatttggaaaaagagcagaaacaatatgataagcagtcattgatgaatggtacatggaatatttttgctgtgtggaacaatagaaagtctgaagtccaaacagcatgtggtatactcagcatatatgccctcacaccatttgccacagcaacatgccttggttatagaattctgtctatactaccctaaaagcttagctaacaactgtcttaaaactataatagcaaagaggaaactgaaaatcacgttggagggaatagactcacaaactgaacactttgtgcttgcaccaacttgtacgatcacaagagtgcttgc

SEQ ID NO: 75264 - DNA, 441 bp, Oryza sativa
  unsure (1)..(441): unsure at all n locations
tgtatcttccattatattntgttaagcatgtatctttcactttagaatatgaagaatacgaggcatgttgtatcataaaggaatctaacaaaattatatcattatgtttgatagaactttttttccaaaaataggccctaaacatatagcgatgatatttaactcggtgtatataaataaagtacaacactatatgattaggtgttgtgcaacctactgcgtaggatatgctttgtgaaaagtaagtagctttacggaccatcctacgtgatttatacagtatcaaatcctgtgacaccgtaccataataatccataaacacattgtatgcttaaatgtcacgacgccagtcctgtttagctcacaccaaacttcctcaaaacttccaatttttcatcacatcacatcacatccaaaactttccactcacataaactcgta

SEQ ID NO: 75265 - DNA, 413 bp, Oryza sativa
  unsure (1)..(413): unsure at all n locations
agcttcttcctttatgacatacaactcccgccgccccagggcaacgcatcacggcagcaccaccccttggttatggttttggatgggggaacaggttagaatatgtgaagtgcccctcttcggcctgctacgccccgctcccgtgcgccgctttcgccatcaccgcttgctccgccatggcccacgggccaccgccaagtacgggaggcgatcgggatgtccattatggttgtgaggggatttatagtggcggcagtggatttgttcgaataagtgagggttagtagagtatttacatattctcttagtcaagtgtctaatttcttgaactcactttatgtgngactggacatctaaaccacggggtaacagattattcagttcgagaaattagcggaaaatcgaaagctact

SEQ ID NO: 75266 - DNA, 463 bp, Oryza sativa
  unsure (1)..(463): unsure at all n locations
tgaacatcaggcgctgtttggatgggactaaagattnttagtccctgttacatcggatatttggacactaattacaagtattaaacgtatactattgacaaaactcattctacaaccttggactaattcgcgagacggatctattgagcctaattagtcaacgattagcctatgtgatgctatagtaaacatgtgctaattatagattaattaggcttaaaaaaatatcatgtgaattagctctcatttatataattagttttataagtagtatatatttaatactccaaattaatgtcaaacatgtccctatatccaaatcaatgaatagtctatccatacgacaaatgacaagtgtcgcatccaaaaatcgtcgaatatttcctcggatccacactgcagggtccatgcttcattgatttgacccgactnttatactcggaaccattgcgtggaggctctc

SEQ ID NO: 75267 - DNA, 400 bp, Oryza sativa
  unsure (1)..(400): unsure at all n locations
ttcttgttctattcttagnggttagggtactttaccgtgctatgctggcatcgcttgtgatttcagaatttcaggccacactttcccgtaaataaaaagaacaaaacgtgtggttcatgtgaagatttaaaacccatttcatgttttatttgtaatatatgctacaagcttacgttgattttcaagatggctatgatgcgctgttgtcagtttggtgatgtacataagcccaaaactggttgtgacgaaactaaactgctcttcgatttagtatgtgaaattgtaaactgctcttcacttcactcacatactctaagcttgagctgaattataagagactctattgtactatattgtatacttagaataggaagagaataaagtagaagaagttggagga

SEQ ID NO: 75268 - DNA, 97 bp, Oryza sativa
tgtggtgcaaacccatgtcgggctccctataggcttatcggactgcttatttccctcactctcaattggaaagctcgaacctacaaatgatgacctc

SEQ ID NO: 75269 - DNA, 408 bp, Oryza sativa
  unsure (1)..(408): unsure at all n locations
agcttttgtgaccatatggggcccaaaggacagcaaaaggacaagccctaatgatagcaaaggcagtggtattctgcaaaggcaaagagggaaaactacaaaaggagagctcttcatgtaaaagtacacacagcatcatctaagctgcttggcaaattagaaaagcaaagagaaacaaagtggggaagaaaaaggatacaaaccatatgaaaggggaaaaggaacacaaaagacagtaattaaaaccatataagcaaggcactaatctctctagctctatccagctntagttcttttagcccttaattagtctttgcttaactagttatctggtgcaagcaaagcatgcatgcatgacacaggaaggaacagcacagtacatgcaacagggtagcctgtcgagagatc

SEQ ID NO: 75270 - DNA, 223 bp, Oryza sativa
ggtacctgctggggttaataagaacctccttcgtgccattatataaaggaatttaaggttttttaaaatggttgaccactcaattttgagaccctggttaaaatggttgaccacctcctctaataaaaaatttatggtaatattaaaaaacaaaagttgtgcctaaaggactttagattataaagtaaggccaaaaaattaataataattcttaaaatttttt

SEQ ID NO: 75271 - DNA, 416 bp, Oryza sativa
  unsure (1)..(416): unsure at all n locations
agcttcagttgctcaactctaatttaccagcactaggatttctatcagttgatcacttcattctcttcaactcatcgnttagaacatcaacacgtgcatggttccattatagttgtttcatcattacctttttttttaataaataacgcagttgacttttagacatgcttaattattcatcttattcaaaaattaagtaattataattcattttgatatgattttttatcattaaaaaatcggtggcgctaatacgcatagaatgcagtttgagcgccgcacaacgctccctccatccagttttctctttttttaccaccccacctttactcagtatcccaccattcctctagatattttctgttatctcattntagtaaaatatttaccatatgggttttctttccgagttttct

SEQ ID NO: 75272 - DNA, 438 bp, Oryza sativa
tattcttctgtatcacatgagtgattcacaggatgatctataacccaatcgtgcactggagaatataagtcataatgttcttatttatgctctaggattagatcgatctagagaatattttcttatttaccttgcaatcgcccagatttaaatataatccaaaattattattgagattttaaataattaacttcacaatcaaccctgcatctcttaaacgaattgttggcctggccacgagaatcaagcatccaataaacaatatggatcaactcatgaccgtggcgtgttaagcccgtggtgatgttcatgatcgtcggagattaaatgcattgagatatgccacactggtgcagatgtaacctggacttttaaatgcatacggagatggctgatgtcgtctcagtgtcattaactgcttgtgaaaaaaaattcctt

SEQ ID NO: 75273 - DNA, 403 bp, Oryza sativa
  unsure (1)..(403): unsure at all n locations
agctttgttataaattaaagctggattgccatgatcttttatctaaaaatcacttttcgttttgtctggctcgcactggtgacatatattgtagagttttgtgaagaaacagaattttggaatagccgaaggatgtgttcgcttcaggtttatatattggataggtttatacgtggacatattgtantgttgtgaaatggctagagtctagatctacttatttgatatcggattggaaaaaaaaaggtcctgaaaaggtgaaaagttacatgattgttgcttgctagtcaggtcagctagttcattggaaccgaataaatcgttcacttaataccatcaaatcacaggatatttagtttgataccaccaatatanttttggcttcacggctcgccctattacg

SEQ ID NO: 75274 - DNA, 439 bp, Oryza sativa
cttgccgtgacgcatctcatgtgttgtgacaaggctcatgtgttgggcagtcgcggagtgcgggtaaagtgtacatccactgcagtgtgagtaaaccaaatttattcgaatagccgtgctcgcggttaatgagcatcgggacatgtattacacttggctagactctaaattctttaacttgagtgggatggaatattgcatgataattattgtgctgatggagccacttcctgagaggcgggaatgtggacgtcctcagaaaatcataacgactcaatggcgggaagctatccttgggatcacaacggatggtggacagaaccgtcattgtttaatatgaacaatggtattaaaacttgattagtctttgctaggtcttagacttgtgaaaagaattacacaacttgctttgcgcaaatgaaccatagccatcctttga

SEQ ID NO: 75275 - DNA, 417 bp, Oryza sativa
  unsure (1)..(417): unsure at all n locations
agcttcgtatgaatgcttctcccgccaccatcctttcttccaaggctcccttgcacaaaaccgagaaaatcaaaagaggcttctggtgtggtgactgtgaacaagcggctggtcgctttcaccttcatctagcgaacgctcgtcaagttctcttcctgccgaattaagttcactgtgaattatatcgatgtgctaacgtgtgacggtgtgagaacaacgattgggggtctcttgggtctcgatcgatcgtgctgcagccatcacaataattntatttctgactaagccatcgcaatgggaacaaacgggggtagtactaaatactaatccagaatcccgttttgattgggataagtgatgggaactaaatggtcgtatactgatttgattttacctatcacgtcagtacctgaacat

SEQ ID NO: 75276 - DNA, 377 bp, Oryza sativa
  unsure (1)..(377): unsure at all n locations
gacctataaaactcaagctacaaatgnattttgaaatctactacaccccaatcaaaactataagaatgataagcaaccaggtaaaattgttttaatggtttcatgtattgactacctacagagcatgggccaatttctgacacaatattgactaggtggtcaacataaatccactatttacaggaatggtgatcattaacgttgacgcatagcattcagcaagcctgcaactaaatagagcaatacacctagaaattgtagagtataaattgtgggagaccgagtggcacccaaccatcattatgtgctaaatgcagtgattcatcatgctccatgaccaaagtaatcatccatttcagttgaacttacaaggaaaa

SEQ ID NO: 75277 - DNA, 371 bp, Oryza sativa
  unsure (1)..(371): unsure at all n locations
cgcttgcttgttttatttcaagtgcatcactgtgtgttctgtgcaatccatgctcacatcgtccgtgtgcgcttccgtgagaaccggaaggaccgcatgcctccggaacgctttcgccgcaaggtacctgatccccgcctcttaactattatatctagtgcttaattgatagcgaattagtatatcatgatcggaacgatttcctttatctggtactgcagatttaagaaacaaagtctgatatactaatagacgtaatgattntgcacagtatttgtagatatctcttatctgcacatatggtctaatatctttcaagcacgctgaaaaataaaattctgtagtgtgctgattctatgaaggttaccatt

SEQ ID NO: 75278 - DNA, 373 bp, Oryza sativa
  unsure (1)..(373): unsure at all n locations
tgcccgcaggtacaccaaacacacacttatcggtgttcagttttatgccggcggagcggagattctcaaaagtttccgctagatctgaaagaaagtctcttggttgcgcgtttttacaaccaagtcatcgacatacgcctcaacattacgtcctatttgactacccaaagaaattcgagtagtacgctgaaaagtaggacctgcattttttaacccgaaaggcattgatgtataacaataagttcctaccgtggtaatgaacgcaggtttttcctcatcctccctagccatgcgaatctgatggtaaccagagtatgcatctaganaacacataaggtcgcaccccgcagtggagtcgacgatctgatctatg

SEQ ID NO: 75279 - DNA, 324 bp, Oryza sativa
  unsure (1)..(324): unsure at all n locations
agcttcttccaaagcatacggctttctagatgtatatgatgatctctagacagatggatcttatatgaatcgtatgatgaagtaccacatgagtggatatataggaaaggaatccaaatctgccgaatcgctcatgttatgatcttctacatcctaggtctccgcgttccgtcatctggcttatgttcttcatgtagcattcagatcgaatgactctatgaaattacgtcgatactcctacatattatgggtaacgtaggagacatccctantttcccccggggtcttaataccactgcttagcttcaatcgnctctgaccatc

SEQ ID NO: 75280 - DNA, 303 bp, Oryza sativa
  unsure (1)..(303): unsure at all n locations
agctgcaagcttgtttattatttntaaagntctatgcgaatagggccccaagctttttcccacaaaaacagaattnttgcagaggaatttggcgatttaaatttgccgaacccggcaaagccggggagaatcggatgtaactttttttgtagatgtccatggatatattataagccctaatttcgagtccgtatgaaaaagatatgactgttttaaggaaggtcactcgaatcgggttctattcctttctagtggcncaggatacatgcaactcacaaaagctatcggcaacagatcaaacac

SEQ ID NO: 75281 - DNA, 219 bp, Oryza sativa
attaccacccaagtcccaacgagaaggaacttgagcgccattcaacttggagatggaggcacaccacttgatctggaaggttgattgtcccacactaaatgtcatgaggcgcatgccactggtcctcactggcacttgcccaagctgagactccgatactgtgacgtcgagcttgggtccatccgggtgcatccccagatgggtcccaacctgccttat

SEQ ID NO: 75282 - DNA, 401 bp, Oryza sativa
agcttattaatgcttttacattgtatgctgaaaatcagaaaatggtcatgcctagtggtcctctcacttgccaagagggatatggtggatcttcttagcatgcttcccacatcccatgaatcttggggccagacagccatccatttcagtgtctggccgcaataataaaaattgatgttgcgcgcaatgaccaacatgtaagccactcaagaagcataattggtctataaattctggtaaaataatatggttaagaaaatctcctcacaaaaatatggttaagaaaatttgtaaagaaagttacaacatagtacatagtattacctgcatttgggagttcctgcgtgtaaagggcatgattggatcacagcgacgtctatcatgatgtggatacctgaaca

SEQ ID NO: 75283 - DNA, 413 bp, Oryza sativa
agcttgtgggaattgatggaagccttccaaggacagaagccaaagaggtaagaacataacatttttcacatcatatgcatgtgccggtcaatagtgtgcgaaacagtgcaaattagacctattccagaggtcaaattatgccttttgaaagtgattaaaaaaactgttagtcacaatttttaattgatattacgtgttcactgttcattcctcgttcttaagttggacaagagtgcaaggaaatatacgaaaactctcttgtagacgggaaccctcaaaagtctgggtttgtggttggcaaattgaagtgcctaacagcaccgaaaggcatatggagcaagctttgacagtaaatgatgctgcgactttccagtagagtgaatacacgccctaagagaattgttcatgttcat

SEQ ID NO: 75284 - DNA, 433 bp, Oryza sativa
cttggagaagatggcatcatacacagaaggaacaaagagctattacattcaaaaagtaaagacaaggccgattgaagaaggagatttagtcttgaagaaagtgctcaatgaggtagctgttggaaaactcgagtcaaagtgggaaggaccattcatagtcaaaaagaagacagaaacaggagcattcaagttagcatatcttgatggtgaggagttaaagcatacttggaatgctatatctttaaagaaattttatgctaaaaaaaagaaaaataagaaaaaaataatataaaataacaaacaagagatattacttgaatacttatagagagagagaatgagaataaggagaacacgggagctcgagtttgtagtatactcactcagatgtaaatacgaatgatttccaagttaatgtatataaacaggacgt

SEQ ID NO: 75285 - DNA, 420 bp, Oryza sativa
  unsure (1)..(420): unsure at all n locations
agcctctattgacatgaatcacttagggctaacaagtcgacttaacataggaggatgtggccatgccttctacaaatatcctctagactctagaaaaaactcaaatagtcccaatgaccccttctttgctacaacattcgtgtgcactattactacttggagagatcagactcaagaagcaggaagtgaaggaattgcctttgtgctttcttccaccaacaagttgataaaccactccttgngaggtcagtacctatgccttttcaatgcgtcgaatacttcacaaaatatattagctatcgagcgtgataccttcatgaatcctgatttgaacgacatggatgataaccatgttggaatagatgtcaacagcttgatttgcatcaactgccataccgctgggttctacacctctgatgg

SEQ ID NO: 75286 - DNA, 383 bp, Oryza sativa
accttaaaactaagcttacttgtcccgcatccgtttcgcgaagccctgcctcgttgtctgacttatggggatacgcccggtgaggcagttcgccattgtaaacccggttcgcccgcccagccgcttgacgcgttaacagttgactatactcgacgaccgaaacatcgtcgatcattctgcgggcttcggcttcggcctggtccagggtcaacactggtaaagtagaatgtgaaactatgtcaaaagtcaaataatgcgaaataacacagcacaacaatatatagcaaaagaacagtcgtaccggttcgctcctcatgaagtaataggttcggcaaaccgtcgatctcttgccttgttaacacgcacttgcatgaatgggagag

SEQ ID NO: 75287 - DNA, 357 bp, Oryza sativa
ttcttatgtctgacggtactattgaaaagtacaaggctcggcttgttgctaaaggctatactcggaaagaaggcgaagatttctttaacacttactcacctgttgctacattgaccacaattcgagtgctactttccctagcagcctcacatggtcttctcgttcatcaaatggacgttaagacagcttttcttaatggagagctggatgaggagatctatatgtatcaacctgatgggtttgtagttgaaggtcaagaacgcatagtgtgcaaattgttgaagtctttgtatggtctgaaacaagctcctaagcaatggcatgagaaatatgacaaaacattgacatctgcaggct

SEQ ID NO: 75288 - DNA, 448 bp, Oryza sativa
gcttatccaggtacgtagtggcaatctggctaagttaatatattaaccgttacaccaattaagttgttcttactaattataagtagaaaaacaaaagtccttagtgcgtgcaagttggaacacatctttacattgtactatcgtagtcataattaacgtacatttctttggtgtagtcatgattaccatcgcaagactgaaaaagaaaaattctgtcagcaaaattcaacgaatcagataaataagatttggagaacaaagtgaaagtattcgatctaaacatatccaaacgtattaattggtatatatgtacaattctgaggtccttcatttttatggccccgtgcggtcgctcgctttgcacgtatatgtgagaataggcttggtaaatggtaatagaagaatgtatatatatatatatatatatgaacagggccatagagtgggt

SEQ ID NO: 75289 - DNA, 407 bp, Oryza sativa
  unsure (1)..(407): unsure at all n locations
atcttatttaaacgttcagccaataatgtaagaagctcgcccttttgcgtggtaccctggaggcacaggctctcaagaagcttgggacggtatttcaggcaacgggaaatatactctggtaagtctccaatggatggagtgccctctcttttggtactgcagggaacaatagtgatggacagagaccggaggcactcacataagtcactaattgctgtaagcaaattcttgagtagattgtccttgtcgtcgataaccacaccgagcttcctcagttgccatagcttcccaatgtctttcaactcttgccagtccagaccttgacattgaataatacctccacgtttgcccatttttttatcccaagaggaattcngacataggaggataatgggctcttgtccctg

SEQ ID NO: 75290 - DNA, 453 bp, Oryza sativa
  unsure (1)..(453): unsure at all n locations
ctatgaaactaagcttttgaagcctggcctccaggtaccacgcaaaagggcgagcttcttacattattggctgaacgttttactaagcttgtcaaggtaacattgagttggacctcattgaaacagaaaaatctggagggtcttggtgatctgcccaacttatgctatgttaggttcagaaacaagggatacacagatggcaagctcaccttcattcagcaaaaattcaaaaatctcaagtactttcttgtcgagggcaaaaacatgagaggcatcaaatttcagaaaggagcagctccaaggctcgagaagattgtattgtccttcaccaacatagagtctcttgatggagtcggggaccttccaagactggaagagctcgagttgaagagaaacagattccttctttcattatctgaagtgggagaaantnttgagaaatacatgctcacc

SEQ ID NO: 75291 - DNA, 384 bp, Oryza sativa
agcttgttttgttttgcttgtaagtcaatagttcagaccaaatcagtagtggtttgaagaggacaaactttcaaccaaaatatggaggaataaaggatgtttttcgaggtgtttattcagaaggtggagtgcgagctctctatcgtggagtacgtatgtatatccgactcatatatgtctaaatggctattcaatcaccataaaactctctcttgaactgaaaacgtcggatgtatatattcctgcttcacttttgacgagtatcagttttttcagtaccttcattactgtagtagttttgctgctgaggactcttatctatttgtgttcaggtccaacgctcatgggaatacttccttatgctggtcttaaattctacatata

SEQ ID NO: 75292 - DNA, 432 bp, Oryza sativa
  unsure (1)..(432): unsure at all n locations
ntatggaccattgtactcaaaggtataacacatacttntttgttgcaatgtaacgcaatctagccttaccccacttatctttcttttcaaaaagagttgtctgttttgtgtataggcagctcttctttaagaaacatatcttgaattatgtttctgagttttaaatatgatgtgttgttctggtgaccttttttgtgcttacaaatttccagcgttctgaaattgtgagtggtgttcttgaagtatagggcgagactgaagaaagacgtgatatatcattcttattcatactataggtgttctgggcacgtctggggttattgatagaatgcgtacccttttagtttttttctataatctcacgatggttccatgcagaggaaaagggtgtttcagatatctggctcanagcaatgaagaacaatgagattc

SEQ ID NO: 75293 - DNA, 385 bp, Oryza sativa
  unsure (1)..(385): unsure at all n locations
cagctttcttgcttcagcaacagngccctaattttctgaacaccgctatatatatatgaggctgaacaccatccaggaaatgcacacacgattggacacttcgccggacacgtaccacgtcggcctaattaagcagtccaagaacgtatatactcaccacttcaccagcacatttgattctgcacatgaagatcaccgtgcactcattcaaggccgtcaagccggcatacggccccggcgagttccccaccaccaccggcgacgtcgtcccgctcaaagtgttcgacaaggcgaactttgacacgtacatctcggtgatatacgcctaccgcccaccgctccggccacgccgcctcgagcggggctcgcaaggcgctgacgagta

SEQ ID NO: 75294 - DNA, 445 bp, Oryza sativa
atcacggaacttcaaactcagctgcttggaatcgactcctatcgtttaagacgagcttcggtagttatatggatttgctgggctaagaacttactgctaattggattttgctagcgttttagaaagcataaattcaatcaaaatcccgtttacatattgagctgcttgtgcaagacccgtaattgcgaattgtgagttattaaccttaattgtttctttacaaaagagtagaatggaataacgcaggggtctactcaaaaccccaaatgttgtaaatggcatgcttaatatatataatggaattacacattgggacatgtaaaccacacatgcactttaaattttgaaatatattcgatcctaaaagttgtagatgatggctaaagataattacatgcgattctctgaaagaaaaaccaactgactcgtattagactggaaatga

SEQ ID NO: 75295 - DNA, 426 bp, Oryza sativa
cacccgcaggctgccagctttttctctttttcgccatacgattttctcaaatgtgccgatccgattccagggatggcttgggagaaatgaaggaattaggccggggatcacaggaaggaattttgtgcacttttcgaaggtgggattgaggtggaatggtgaaccctagttcggcggcgccatgctgcactgtagcacagagtggggaaaatggtgagagttccggcggggaagacgaaacgtcgcttggatctcgggatttcttgttaagggtatccgacgtgcaaatgggcctaagcctgaacagtacttcagcccaatactattaacagcgtggcccattgtgttcttagggacttacgcatattttgctttgcaatattatgcgcgcaatagtgtcgcccatgctgataaatccttctatgc

SEQ ID NO: 75296 - DNA, 459 bp, Oryza sativa
  unsure (1)..(459): unsure at all n locations
tgctacaaacgctcctaaggcgccatgtggcatcctataaactctcccaagtcgccacatgtcactcaaataaaaaagagaaatctgaccgttgattttcatttaaattggtggacccactaattttgatcgttagatttatatttacataaaaaacaaaatctacctccgtccaacgtacgtcgtacgtacgatccctccacaccgtatgtactacccatctaacctccttttcttttttttctccttttttttatccccataatgattaaaattatnttttatgggcctaanaagcccatcaacctactggatccccaaaaaagcaaaaaagaaaaaaaaaacataacacgtacactatttgacagaaaaaaatagtacgatcacaggcacatacgaatactatatagaaaaacaaacgatctatacttatccttacatatgactatataaaacatg

SEQ ID NO: 75297 - DNA, 436 bp, Oryza sativa
ctcgtcccgggacctctaagcgactgcagctgcatctttaaaggtcggtctgtactgccttggtaggacttctatttaaaatataaactgcagtattaactgcttcaaaccagagagaattaggcatacctctgtcttggagcatataattggccatatcattgatcgtccgattattccgttctgcaactccattttgttgagcactatatcctgccgttagctgttttcggatgccagcattttcacaatatttctcaaattcttttgagatatattctcttccttgatcgctgcgcaatactttaatttttcgattactctgattttccaccatggacttgaatttattgaatatctccaaggctgcagattcttcttttagaaaatatacccagatcattcttgtataatcatcgataaatgtgaaaaagta

SEQ ID NO: 75298 - DNA, 447 bp, Oryza sativa
  unsure (1)..(447): unsure at all n locations
nttctagttgctattcaagatctgaattacagttaaattctatcaaacgcaataatatatataagctgaagagacagatctgttggtttgatcagtgagtggatcttctttgtgctctcagctcgtcgccgtagtcgctgaggctgggaggggttttctctggatggagcgtgcatgcgcgccatgagtggtcgcgcgggagtgaactagcataggaagcgggccagcttgtgcgagtttgccgcgctcttccctctcgccgtctcgcgtcgcgtacccgcgcccccgtacgtcaccgctgtcacggtgtcacattgacttttctagttgtgtggagtatgtatctgcagcgcttgtactctgtcagctgattgttgcgagaagaggtcggctaagccgtgtctcgtagactatgatcacatccctattatatacagtgcaaagtac

SEQ ID NO: 75299 - DNA, 261 bp, Oryza sativa
  unsure (1)..(261): unsure at all n locations
agcttagatattgatgggtaattacttcattntgtccccaaaaaaaatgtaaacgaagtttttttttttttgttttttgatcatgcagggatgtgatgcgtccatccttcttgatcccacaaaggcaaacggctcgccggagaagacagcgatcccgctccgcgggtacgaacgcctgaacaagatcaaggcggtcgtcgaggccgtctgccccggcaaggtctcctgcgccgacatcctcgccttcgccgcccgcgactc

SEQ ID NO: 75300 - DNA, 283 bp, Oryza sativa
cagcttgctcttttttcttgggaacgaccaccgggttcgccagccactccggatggatgacctcacggataaatcccgcctccaaaagtctcgccacctccacccggatgaaggcttgacgttccggggcctggcgccgcactttctgccggaccggccttgcaccctgccggacggcgagacggtgctcaatcaacctcctggggaccccgggcatattcgccggtctccatgcaaagacgtcagcgtttgcccgcaggaaagagacaagcgcgtctttcta

SEQ ID NO: 75301 - DNA, 403 bp, Oryza sativa
  unsure (1)..(403): unsure at all n locations
ttctaacatactctgtgtcaatccatcacatgactgggctttattttccctatatgttttcccggctacaggctgggaatgcaaagatagaaagtgatgggattttctgagtttgagacttaccaaactatttagctgcgatccgatttatacttgctcgacttgatctgtcgctgttaacctcggtattgtgccaccttttctggagctgcgaattgcattgcaatcgtgatgagaaagcgaatatgaatagtgcggtggaagctangaggtgactgccatgggggatgaggcggtggactgtgctatgaatacacaccgggtgcagaaaggaggggaaaagacccctgggccgatgggaaatgcgacgcgttggactccggtggatgacttcccgccgact

SEQ ID NO: 75302 - DNA, 419 bp, Oryza sativa
agcttaaggctatatatgtgccatcctctaatagctcaatcattcattcgaacctgttgatagaatatataacttgtgattgactcctcaatcatctttggcatgggcatgcactttcataatctacaacatcgaggggtccaaaaatatctctccataggaggaagcaatcccatcttgattattcatatcccactacatgtttcatagcatacccggaaactacttttataattacccaattacggagtagcgtgtagcagtccctaagtaagctactataccatgtgggaaccatgataatctcaggtctaaaaattcaacaccaacactaaatgagatcactgatgacacaacacatatggctcttccagtgtctcatgttgggtctatccaacaacatgttcagcaacatgtgt

SEQ ID NO: 75303 - DNA, 443 bp, Oryza sativa
cggcatgatctcgtgccctttccttcagggtggcatccactcgaattccgtcagttcgacggtacaggagatgcgagggaacatctagcctactttgaggcagcttgtggtgacaccgccagtaacccgtcactgctattacatcaattctcaggatctcttaccggcccggctttccattggtatagacggatgcctattgggtccataagcaattgggctggcatgaaagaggctttcaaaaaacattttatcgcaatgaaaaaagatttctctatagtagaactcgcacacgtcaaacagcgccgggatgagaacatcgatgactatattgtccgctatcgtaatagttatgtgtgactcgctagagagatgcatatagaggatgcgaaccaaatgtgtgtccatgggatgctacaacattggttactggagtgtcatgt

SEQ ID NO: 75304 - DNA, 196 bp, Oryza sativa
  unsure (1)..(196): unsure at all n locations
agccgtacattctctatggtngnntttgtaggcaaacatcggtgacttatcttgcccaatgaccttatggggtttgaaagtttcaactaaaatatgcaaaactgcggggggcactttaatcagtacagaattaagccttaacaaacatgctttctctagaaatacccttttgtgaaacgcttgggatggttgaata

SEQ ID NO: 75305 - DNA, 413 bp, Oryza sativa
cggggtgacgttcaagacgcgcacatgcgagcgcttggtgttatgttatggccccgacgacccgtcgacggggagcttctcgttcggcggcgacccggacacgttcctgcaggtgttcatctggaacgggacgcgcccggtttcgagggacgggccatggaccggctacatggtgtctagccagtatcaagcgaactccagcgacatcttctacttcttcatcgttaacaacgaggaaaagagatacataacgttcagcgtctccgagggctcgccgtacaccaggtatgtgattacctacgccggcaagtaccagttccagcgctggaacatcagctcgtcggcgtgtgatgtcgcggagtggcctatatgggactgcaactattacaactactgcggcccgaacggctact

SEQ ID NO: 75306 - DNA, 401 bp, Oryza sativa
cttcagcgatagaagagcacacggactgaaggatcatcattataatatgccaacaaactgatgtggtaagacattgaatgcccactgttgtttttcttcacaccacgctctggaactagtttcccaaaataagagcaagcttaatggtatagcccactactaactccaaaacatctatagctaatgtaatagccaattcattaaatagttgcttactatactattaatacctggtcccacctgtcatacacacattacgttctggagtccgtattgcagctagctatagactattatttctttttatctatctcttctaaatatgtttatagctgctattggacctgctctaagtagggtggcctaatgttaaaatgtactccacaatctatccaaataat

SEQ ID NO: 75307 - DNA, 322 bp, Oryza sativa
ccggccgaagccggcaagaactatgtacgtcacagcggttggtgtgtgcgggataacgtgcctgtcagtactgtgtactggcgaaaaacaaaggcacgcggagatcatgaaagctttgtcccaaactctgtaaaagacatgcttgttgccaccatgctttggacattcacccttcctgcgggtacagaggacaaagagaaaaggtggactctgaagaatatggcctaacagtttcagagcttcaagggagatctgtaccagaagtatatactgtatgggcagacaccgaactttgacacattcccaaagcttagggatcact

SEQ ID NO: 75308 - DNA, 402 bp, Oryza sativa
atcttatcttaattatatattggggaaaaatggaaatggaaatgacccctcgatcatgagagtatgaaagatatctaacacgagtcatataaatttgacaaagctcaatataatgtcaagcaatcatttgcataataaggttgatcattaatgtacttgcatatggccttgtgtcacgcccggaatttctatccaaaatttcaaacgcttacatgtgtgtgaatccctcgtccaggaatcagccgaggcacacaataacaaattgataatagagtacaattattactctaattaataaacgaataaaatgtcattacagaagtagatagttcctctcaatcaataaagatctaagcagcggagaataagattaatggcgcagacgggtccactccacaggca

SEQ ID NO: 75309 - DNA, 436 bp, Oryza sativa
  unsure (1)..(436): unsure at all n locations
ngccgtatgctgagttctcttacaacaacagttaccaagctagtctgcatatggcacacatagaagcactgtatggacggaggtgtcgtactccgctcttctgggatcagacaggggaacgccagttgtttggtacacaagttttaaatgaggcagaagagaaagtcagagctgttacggaaagattgagaatcgcgcaatctctgcagaaaagctatgcagacaaccgtcgaaaggagcttcgtttccaagtaggggattatgtgtatctctgtgtcactccgctcaggggagtacatcgcttccaaaccaaaggaaagttggcaccacgctttgtgggaccatatctgattttggaacgtataggtgaagatgcttaccagctcgagccttcctccaacatgcttggcatccataatgtgttccacgtcttcca

SEQ ID NO: 75310 - DNA, 415 bp, Oryza sativa
  unsure (1)..(415): unsure at all n locations
agctttatcttacngttgcggcgggcggccggaaaggcggaaacctgtgtgtggctcccgaccgtcgaatggtttgggcggcaacagctgcgtgcccgcgtgagctaagctaagcagccggccgcggccacgagctgagcgcgcggacaactggaaccgagctggtgtgtggcctgtggcctggttgatgatgcgagacgagacgatgagctaaaggtcgtagctagagctgcgtgcgtgtgtgcgtgcttgctttgcttctgttggacaaaaaggaggggggaattcaatgcctcgatatactactcctctccttggcttgttcggtttctctaggttaattggagggagtgcattgatcgtctgatcaatctncgcagctggccagcctacgcaacattgcaggcaatgcgtg

SEQ ID NO: 75311 - DNA, 429 bp, Oryza sativa
tctcgttcttgcattaccaggaacccggatggcttttattaccccgccccggtgttcccaactattggcatgcgaggtttccctgaaccgactagttacttagccagggtgttccattccaccttgtggttgcactttgagtatgttcgatgagtttcccacacgaatcggtccttatatgcgaataccggactatgccacataggcacaacccccgcatcgcgagttttcacaattcatttttattttcaaacacaccgacaccacatgttgggatttgaaggcttcacaaacccatttcccaagtattcgacacacaacggtgtatgtgggatatttggtatacgcgctcagagagcacgaataccgaagtaccacaatggtggagcgaacaggaaacacggtagtacaacctacagaaatagtgcg

SEQ ID NO: 75312 - DNA, 411 bp, Oryza sativa
agcttcttagagttacctactgaattagatgaaaacatgcagatttcttcatgctatcagtacatctctctattatacactaaaagtctattaaactttatacaaatattctcaagccgtcacatataactcctacaaatgctcctacgaagccacgtggcactctaataaaccggcggacccactatttagatccattgaatctattatgattaaataactaatttaacctccccctaaattaagcaaagcaaggtacgtgcccctcctcccagtatgtatgtccaccgactcccccctcccatttcctattttctagctaaactctctcattttccaactaactactaaatatataacaaaaggtaattagatagttattagcgcttataactcgagagttatatatta

SEQ ID NO: 75313 - DNA, 444 bp, Oryza sativa
tgaataaagttggcaatgtggactatggagtttgggttcatgtgatgcatgttaatcccgtagaagttcaagatcccacggaaaaacttcgaagttggaagagcaaaaccgccatagaagaagtgagaaaaaaccatgacctcatgtgtatcgggggttgggaaagctttaccaaatgctggccgccatccgatgatctcctttgctgggagaacgccgtgcaccaccatcttcttcaagttctcctccgtcacgtcggacggcgcccattggcttttaaagctttccttttcttccgtcatcgattcgatccgaatgagatgatttgattcgagagatggctggggagagatgtggaatcgaagcggtgagttgcgtggaggattattgtgaactattggaggtggattggggtggaatggtgaaccctaatttcgccggcgc

SEQ ID NO: 75314 - DNA, 416 bp, Oryza sativa
  unsure (1)..(416): unsure at all n locations
aacttgtggttgttgacttggcgggatctgagcgaatagacaagtcaggtgagtgcattctcgtcgattaatgccatgtcttgctgcacttctatacctttgacaggataataaggctaacatacgcattgggcattaatctctcaggaagtgagggtcatacattataagaggcaaaggctatcaactttgccctaagtgcacttggaaaatgcatcaacgcgctagctgaaaacagcccacatgtaccagttcgtgattcatagcttacaagattgcttaaagattcatttggaggtaaatacatgctaacctgtcatttggtctatgtaanaatgaaattgtgccatagcttatgaggcacgctcatctttatctaaaagctaataaggagccaagagcatatccctgtcaac

SEQ ID NO: 75315 - DNA, 454 bp, Oryza sativa
tcctgccattacctctgggaggagcttgctcaaggaatccatcattccttatgtctccaaatggtcctcccattggcccaaaaaggctatgaccgtgcatcccgcttccaaatggctgattaaagaacggatcatcgaaaggatccctgcctccaaagacaccagagatcaagctcctctggcgaccaaagccaccgaatccggcaaacgggtccctcccaccaaagaagtcatctcttccatttcgccctctatccatttctaagtgattacgtaggctctgcaaggttcagcaattacgttacctcgagtagccggtaacatatgatacagaaatcgttcaaaaattaagacaccattcatttcacaaattaatccgttcaaaggtacaggaaaacgatcgtgtgcacatggtcatatgcaatttcatatttcttacagagctcactgtatc

SEQ ID NO: 75316 - DNA, 419 bp, Oryza sativa
  unsure (1)..(419): unsure at all n locations
ggcttgctagctnttcatctgcacagccgccatcatcgtcatcatcaatcagagctcatagctgaaaaaggctgggggaggagaaagaaccaaccaaccagcagagcagaaaggaggaagaagggaaaaaaagaaaagaaagaaaagggaacaaagcgagcaaaagagagaattttggctcanaaatcttgcagaanaagggagacgcaacccagaaaccactactcaccttttctcacaagagcaaaagatgatgaatttgaagggcaatcttgacacagctcagctactactaccactactatcttctctcctccccctctgcagctcagctatcttgctctgctgctgatgctgatgctgctgctgcttctgcctcctttcagtctctcaggtgagcagcagcctcagattcccca

SEQ ID NO: 75317 - DNA, 424 bp, Oryza sativa
taattaatttattattagcacatattttctgttgcacaactatttcagatcaaggagcaattaggcttaaaagactcgtcacataatttacacgcaatctgtataattagatatttttttatttctaatacgttatacacgtgtcaaacattcaatgtgatatctcaatgtgatatgatgaaaaattttgtctggtgatttatacgtgggcgaagaaatatgatccctgatctcgtatcggcatggtcccacgatttcttcgacaccgttcgtccgtctgtccaccaccccgaagcgtgacgtgacacgcaccattcacccgccgccccgaccacgttaccgcgtctgcgctgctacgacccgaaacctgcccagccacacgcacccacagcacacccacgcggtcgtagtcactcgcttgcgc

SEQ ID NO: 75318 - DNA, 403 bp, Oryza sativa
agctttacagcctagtcaaacagagccttcacaggagtttccaaccatcatattagtagacatctttctattagccattagataagtgctctctcggatttttattttaaattttatctattaaaatattttaaaaataacttttattttcaaagtagtacatatttaaaccaccaacgctcctaagaacaattttttatgactttgacatataatagcgtatactaaccgccgcacagagtaaaactaaccatttagtgaacactccttacaaccatcccagaggaggacaaggagtaacctgtaaaatgtcacctataccatttgcaggtgacccccttgaaaatagcaacccttcttcatacaacgttacattgattataattatatcccgcatcataaa

SEQ ID NO: 75319 - DNA, 386 bp, Oryza sativa
tcagcttcagctccacctctcactacgggcgatggtaatttatatattcttgaagaaacaccatcaactagttcagaacttcctgataaccaggattatgaaactggtgtaactatgtcctttgatgaacaactaaaagcctttggatcttgccatgaagggaatgaaatacctgaaaacttgtcaggtggagttcttattgatcaagtttatgctgttgcacccagtgacttgaatggacttcttttctcaccaagttcagatttcttgcaatcactagcggagatgcaaggaactactggtcttgaaatccaacaatggagacttgaaaatgatggtgaggtcttgaagagggtagtaagctacacaaaagctcctactgcact

SEQ ID NO: 75320 - DNA, 243 bp, Oryza sativa
  unsure (1)..(243): unsure at all n locations
agcgtttatattttaccaatctgttgcgagaaatacatagaggaaggagtagcagtagctcggatatcgtacggaggaagagggggcccnaacttaattcccatggggaatctgcatctgcttttaatgaccccccgttcacgaagcctgacggcctctatcccaacaatttcaattcacggtttcaccaattattactggatatatatcagatgcagaatgaatctccaatctacttcgacc

SEQ ID NO: 75321 - DNA, 304 bp, Oryza sativa
actgacgcagtataggaattctctctcaatatgatatttcgcttgacatatcgctttctatgatttaacgaaagcacgagaaatttaagttgaactggaatattctttatttattaccgcagtaatcagccctttctaataaaccctacaaaacgagcagcttcttatgggttaagcaaggagatggtactacacacgaatgcacattggcatggttaaatcagaaaaacgtgatgccattgtgtgaatgcacagtctcaaaccacacacacccaacaagtgtccattgttcatgataaagtga

SEQ ID NO: 75322 - DNA, 353 bp, Oryza sativa
aattacagcgacaatatctggccacaactctttattttagacctattttagacatgccgaaatctttgcagaagcccactccggattaaatgggccttaaaatgctagctgcaaatattcggggctatgtcgagagacatgcatcacgttgacaatcccacagtcaaagcttattagagagacaagaaaccgagcaagttatacagtctgcagagaagaaaatacgatcctatgaggacgcagcaaagactgcagcagctatagctcctgctgctggccgggcggctagctctgcagcaaagatgagagaagccgagatgcatgcatctgggcagtgcattgcatgttgtcac

SEQ ID NO: 75323 - DNA, 440 bp, Oryza sativa
ttactcttatatatctatgatgtaggtcaatgttatttcaaaagttatttagatatcatctaaaagtaatttatattttatcatcaaaatataactatgcgagatcctattataaagatttaatgtaatgaatacaacggtataatcggatcgtacatcggatgactaagataagagaaaatttcattcgaagcatacgtggtagaaacatattttatacttactcaatagacaagtattatagattaacacatatttggacaacatttgatggcgtcgctggttagcactaaaacgagatgcttctcgatttagattatgcgaattgataacgtataagtatacgaaatgctttgtaatggaaaaaaattttgtgggatcaagtaccaaaatcactgaaattcacaacgcttggaactatgcttaaaattaaagtaata

SEQ ID NO: 75324 - DNA, 408 bp, Oryza sativa
agcttcattccctcttgcgatgtaacatgataagatatcgcaattatcggcggttagatctggggtgttggttcacttgcccggggtggcgagatatataagacgataaagttttgatccgggaattctaaaatagtcatgtatggcatgtgatgctaatcatgctcttttgcatgcactgcgtggataataggctctccttttttattttctttctacgatacctatttgcaattattattccaattaaaccgtctatatgccatcacgtgtgatctccccgccctaacatgctctgtcactttgcgtttacaccctaacatcgtgcagatatcgatcaatactatgggaaaccagagagtcggctactaatatattactctctcatccatataccagagttttact

SEQ ID NO: 75325 - DNA, 393 bp, Oryza sativa
tagatgcactacggtgaaaccaaagtatcataatctttatgtggtatacctgatattcatcagtgctactaaagcaagcacaaggacctctacatgctagagaaaggtcaatacacctcccaacaaatatgtctgtggactctatctttatgtcattccatctttaaatcttactgcatttggcccgttctgtcgctggcccggtgggaacaaaggataaaagaaatgtcaagacaattatattgttgtaacacaagttgcatcataactttgagtgatactgtgatagcaactaacgccgttcccgtttatcgactaacttttatatatcaacgttgaatgcctatatacatgaagtaataacaggtcagataaacaccttatgacctgtct

SEQ ID NO: 75326 - DNA, 421 bp, Oryza sativa
  unsure (1)..(421): unsure at all n locations
gagctngatcgatctgttcagccaatgtcaccgaagacaagacaagagcttgcaggtgcgaattgtgaggcgctaatagggtcataagccacgtcccatggaaaaacatgagaccattattgatgtgcgcccgcctttctccaagtgatccatggatcaattggaaaggagaaggcccgttttgaccctaacccatatgagatccatgggtcctgcaactctgcacgagaatgttttctgtttcctacacatatgcatcgacactaactggctacaggttttctgatccatagccttttcttttgagactatcctatttaggaaagttcgctatagacttaatctgaaaacactaggttattcaggtccatagtttattttattttggattatatggctatagatactcataatatcgatg

SEQ ID NO: 75327 - DNA, 407 bp, Oryza sativa
tcgcagatcgctcatcgatggcggcagcgcactcgatattctctttgtcaagaccctgtacgacatgcagaacctcttcaccgagttgaagccgagtaatgcgcccttccatggagacatcccatggctatcggcatcaccactcggccagatcactcttccgatcacctttggtgctcgggagaacgtccgcacagagaacgtctacttctagttgctgatttcaagacagcgaattacgccatactcggacgcgcggtgttagtcatgtttatggccgacccacactacacctacatgatgatgaagatgcctagccctcgaggagtcatattcctgcggagcgacaataaacaagccgtcacatgcgacatggaaagctgcgagatggcctatacccgcgagat

SEQ ID NO: 75328 - DNA, 412 bp, Oryza sativa
  unsure (1)..(412): unsure at all n locations
tattcttgctatgtgtgnttcctggctttgtggataggacatcgggaccttgtggcctccgaagttgttcatgtcggcccgtgattctcgtcggaaggataagatatgggtgcactaagatccttctcgggctcggatgtcgtcgacgttccgttctccacttctgcgggaggatccttcgacatggagtcgtccagggttgtagccacagcgttctcgctttcggtcattgatggactagtcgagatcggcaccgtggtgtaaacccggaagactatttcaccgacttgagtccacaccaacaatgttgatgtagaaatttcttggctgatgccgggttgacgctgttgttcatgaagctngatgacatattagaataagcctgagcaccaagtccccctacctggcgcgc

SEQ ID NO: 75329 - DNA, 439 bp, Oryza sativa
  unsure (1)..(439): unsure at all n locations
atttgtgttgaactggtcgttgcatggtgcatgcaactcaatactcgcttgtcttggcaaaccccaactactacatatgtccatatttgcttgctcttatctctctctcattttattagatttcctaacatcaactgtatctcaattgaaccactctgctgctgcatcctcattcctttcaacacttgaacaaaatggaaacgtactagcaaccagctgccccttgccatcatgctttttatccatgatgtcgtcatactttgatcatatttacacctaactagtttgctgctctaaaaattataataactgataaacttaagcaaatgtatgtctntgtcgcttgacctgggtcatgtatctgattgccatgctcattgactgcattcagaaatgggaaccgtgagacagcaccagaacaagcggagcattcaacttt

SEQ ID NO: 75330 - DNA, 406 bp, Oryza sativa
  unsure (1)..(406): unsure at all n locations
agtctgatcatgatctctttcccgtgaatacaattaatttcaatgacaagaaggtgttgatttggccggagcaagccgaatctactaaaggaataggagtaatcattggtgaaccaatgccaaagatgatagttcccaaaaagccggaggttggtgtttggaaagagaataaagtgaagcttcaacttctaaagctcctatgaagactaaagtgacccttgatatgcttttggagaaatatgaaaagcagggtggtgagagagctcacaacaaggggaaaagaccaagatcacctctttgggagcgatntgttcactcgctaagacggtcgcattcaccttcatatcatcatccacaagacatgtcatggggttcttattcaatgcccgcgncgagttatacttat

SEQ ID NO: 75331 - DNA, 444 bp, Oryza sativa
tgttaacagaatattaaaccaaccacatccaattggaatatgccaagtcacccaaattaaaacatggatggctttatttggccaaattagctggatctactcatccagcatattaaggatattaagggaatattttctttttgggttgccccatccaccctgctctttatccaaacaaaacaaaaaaaaaatcagacggtctatctcccatccaacatcattcaccaaaccaaacacactctaacatgcgacaccctctgtggtagatgtactccttctgtccaggagttgtgcacttccctatttttatgtactccctctgtcctatactgtagggacttatgcactttcttttaagaaattaaagaatgggtgatttaaaatagaggattgtgattagcttataatgtgaagtaataatggacatgcttctgcacttctttt

SEQ ID NO: 75332 - DNA, 414 bp, Oryza sativa
agcttgttatatttctaatattgctattggttacttcatccgccctaaaatataaaaatataagtattttttagaatagtactaagtcaaacatttttaaaattgactgctaataggaaaaaaataaaaaagatcgatcacgtaaatttgatgttactatattttcattgaacaaactatcatagtatgcaatatttttttatttaaaacatcttacttttatagatattattggttaatgtatagcatctcgaagactgtattgaagtcaaaaaatactaatatcttgggaaagatggatttttgaagatgtacatgtacatgcaaaataatttcagcacatttctttagtgatgtcacggaaccttctcaggtcctagctggatctgccaacggttacataaacaatttgtc

SEQ ID NO: 75333 - DNA, 450 bp, Oryza sativa
caacattcaaagatgccacatcatcatgcactaacattatttcacatcatcatccactaattaacaagatgccatatcataatccactaacaatcatcacatttaaacatcgtgcaaacatgctatatctttatagtttatataaattaagagcttttcaaatacaaacatgctaaattatcatccaacataattcacataatgttcaatgtataacttcatcatgttatatgatatcctatatacttatatatagctcatcctcacttagttagtgctttaatgactaatctatgaaccaaattatatttctacttgtttcctctaattaaggcatagtcacatcaattttttctagcctttagaagaatactctacaggctaaactatctccctactatattatctgcataaagcgataccaacttaccatttcacgatggatcacta

SEQ ID NO: 75334 - DNA, 412 bp, Oryza sativa
  unsure (1)..(412): unsure at all n locations
atcttgatttgtnttgttgatagatatacgtatgaatcgaatacttataattagatatatactcacaatttgaaaattttgaaaaatttggacgaatttgtatatttcataccatggtgcacaagcaccatggtatggtgccccatatgagtgtcctatatatatattattattattatgtgccatttaactagggttccatggtggcgggtataaagatttaaattgagtatatacctaattcaaatgagtatgaatctttttaaaatgtttaggtatgaacattaacttttttactactttgtaattagttcaaacaagtttgaactgaaattttgacatctttttgttaaaatttaatgtcaagtatatagtatccaaacatataattaagtacgtaagtaataatgga

SEQ ID NO: 75335 - DNA, 446 bp, Oryza sativa
tggtcaggggttatcatcagctgatccactggaggaggtttatattggtgatgggagtattcctagacctacatttattaatgcaaacatgggggctgaccagaatagcaatgaaagattgaatcgtttgttcctttgcttctgttgaaacatgaaaacgaatctagctggggggcagagcagcgggaggcttttaataacattaaacaatattagttgagtcctccagtgcttcgggcgcccaagtccggtgtgccgttcatattatatgtagctgcacaacatagggtgatcggtgccgtcctgacccaagaagatgaatggaaggagtatgttgtgggttatttgatccgctgtatgcttgacacttgaagcaggttcgtgttatatgagacaatgtgcctggccttatattatgccatgtaccaaatccgcattatttggtt

SEQ ID NO: 75336 - DNA, 364 bp, Oryza sativa
  unsure (1)..(364): unsure at all n locations
aacttttcaatcctccgtgctttggagggaattcagcagtctaatttggctgatgagggtcggacagaaacttttcttatcctcatcttttgctgacaactggagtagtataaaatgtgatatctacgaatggagggagtatgntttgttgaaccaatgaacgacactttttttatcaagggtacctacctagcttaggaccatgtggttttgtgccaatatgtatgttgatgttgatgagctttatatcacaactcaccaaggccccacgtcgagtagggttcagaggacttacacaacacatatggcanatggtccttactccagagaaacgcacaaatgttcatgtatgcatatatacaca

SEQ ID NO: 75337 - DNA, 448 bp, Oryza sativa
  unsure (1)..(448): unsure at all n locations
cttcattntcctcggtgtgtgactgaccatcgccattaagccttggtagatgcgttgcagccttgcaggagagaagagagatgagtatcatgaaggaggaccatcttgcgacaagcttcgcgttgctcgctcgctcgctggctcgctgctgcggatgcctttctgctgctagaactaaacagcctcatgtttngggggtgcatgcatgcaatgcgaccagtgtcgatcactcactcgcttgctcacaagcaccagcgcatgcatgtggtgctgggttttcttttgctttgcagagaccgggggaccccagatcaaatgcattgctgctcctgcctgactgcaacttttttattttggcggaaagattaaccacatcacagatgagttgtaacggtgggagccgtgggacagacacgtattgtgttcatttggagtgctgctataccta

SEQ ID NO: 75338 - DNA, 345 bp, Oryza sativa
gttttggatcaaccaggggaggggcgactgaaaaaccttcacacggatgatgcgttaagtttgcaaatgaaagactatattacatttggcaaggtcagattctgttgactcctctagcatagaattggtcgctggacttcattatatgccttgtcatgctgggatacacagagatctgtatggtatttgcgacttcatagatatttgcaatgatcattgaatcattatcatctgaaacaagtcatcaaaccgacaaagtaatgactatgctttctaacaaacacatatattatttttcattcaagaaacatcattttcttttgcagtctcttgataaagtacatg

SEQ ID NO: 75339 - DNA, 299 bp, Oryza sativa
  unsure (1)..(299): unsure at all n locations
taccctgncggctatccacaacggcaatggcagaagtcgctaaatactccattgncatgcactgcacctgcactaatactaacccagcttctggcttctagctcattttttgcattctacaataacaacttctcacaatttaaattaaaagctgaactatttgggggaagtttctgattctgcgaaaagctaccgtatctagaaacttccccaaacaaggcctaagtctgatacacctgcttgtcagttggcacaatgccgataactgtcatcttgattcatgacattgacgtggaaca

SEQ ID NO: 75340 - DNA, 402 bp, Oryza sativa
agcttttaccttcctgttttcaataaagatttggaaaaacctctttataaaccacatctagaagaagggatatttaaaaacaatcacaaaaaaggtcttaatcgttaaatcgaactatatgaggagcaggagttatacaaaaatctaaatttacttgtaccatgccacttcagcgtttgtaagatttttttttcttgaagaaaattgtacgaatcgacttttccactttcaaattcactgttcaagccgccgtgcaaaattcgtcaacacccttttttttctccaaattatctccgtctcattccctaaacccccactccccccggtcgtgggtgtatagaccaagctcacgtggccgcctcgagcgtccaaccgtgggccccacgaggtcactccactttt

SEQ ID NO: 75341 - DNA, 295 bp, Oryza sativa
actcagctatgcatgaacaagccaatgatgattctgtggctggtgtatgaagaatcatgatgagaactctgctctgctagctttctagaatgaaccaaatgagcaagagctcaatcccgcccagaaaatgggtttcagcattatagcaaaggagataccagcggacatggaaatgggaatgaaaccgcccacaaaacagctttgcacgtttgctgatgaagtatcatgttacacatacagtaccgagagttatgctgctgtaaagtaggagaaaagggaagcttcacttgatgac

SEQ ID NO: 75342 - DNA, 313 bp, Oryza sativa
agcttctttctattaacttttattgtgggtctaattggggatgaaaacggattgtaaattttttttcttaacgaccagtacatataattattcgagtatttgaagaatatctactatgcaaatattcgctataaccgtcaaaggcgagaagaatactttgcccttgtttagttttcaacctttttctcacacccttcactttttcatcacatatatactacctcttaataccctcgtttgagaaatatttaattccatttgtatccaatcatatatactactcttaattactctggattcgagaaaattgtat

SEQ ID NO: 75343 - DNA, 383 bp, Oryza sativa
  unsure (1)..(383): unsure at all n locations
ttccaatcactcgacccggatctcanagcnacctgcagcatgcaagctgaatctactcaatcatgcttgatctgcttcagctcgaaccatggacctccttacaagaatttaagttaattgaggggcttttctgctaaagctcaagacacacagaacagtcataggactgcggtttgaatttctgaaaccctaagggctattttgcatattggccctgagactgacacgtggaccccatgagtttaaaatctgaaatgtaaaagaaatactaaagccttacttttaacagcaaacacctaactgtaaaaccatataaatcaatatacttatttgacatgattcaattcttatgttacaaactggaacttaatggggacattagc

SEQ ID NO: 75344 - DNA, 406 bp, Oryza sativa
ttctgttctatcctagcacactattacattatatataacatcatgatgtactgtattctccggttaaacttcgggatgaatttttacattgggctttacgactcatctggaaagtaaatctttggagggaatggaatgaccataacgccgtatcagttgtcatacaacgttgaagtggccaagaagctatgggcaaaatctttatcattgttcaatgagctacataatatagtatgtgaactgaggactatctgaactaacttgtgaaaattttgaggttactgaattacacgtttactctgttcgacgggcaatagtttcaggccttttcactaagctggacaagtgtttgtgcacaaactattacaaactccaatgcaagcttgtacttcgaactactcccttt

SEQ ID NO: 75345 - DNA, 389 bp, Oryza sativa
agctagactcatataactaaaataacttgcaatgtgagaaatgaagggagcatctgtcaagaaaaacaagctgtaaaacacgactaaattataaaacttataaaatcctacctaattaagacgacgaaccagggccatttgatcatcagcatgtgtgagttggccgccatacagtgtacgggtttactaaaactattggcgttacttttttttacttaaatccgatcattttatatctatatgattgctctcactagaacggataccctcatctcaatcgggcggtaagccccatctcaatcgggcacagcgtccgttacaggctagaagtcactgatgtgaagagttatctcaatcgggcaaacggccgtcatgaatgaatatatctc

SEQ ID NO: 75346 - DNA, 429 bp, Oryza sativa
  unsure (1)..(429): unsure at all n locations
taacttcgtctcttattntgcgctaacgaactaactagaatttcttatcatcaagaaagtgcaaaggagcagatgaaggataagttcaccggtggcgcggcggcgtcttctccggcgatggccgatggcggcggcgcgggcgccccgccgaatgttaggtcttccggttgagggtaggggtgggaccgcgtggaggagacgtcgtcttcagagggaagtcgcggtgatcggagcggaagcccggaggtggcgccgcctctgccgcgggagaggaggagggcgttgggccggagtctgttgcggcggaggctatttggagtggctactatgtgggttggggccggcgccggcggcttcggctgagttcctgagctggcgtgtaggtggtctcgtgaggagttctgcagaatggagcgtantgattataaa

SEQ ID NO: 75347 - DNA, 413 bp, Oryza sativa
catgcaattttttatgagcccgagatccagagaaatcggacgtgggcctcattatggcctaacaagtcatcatcagacagcgaggcagatgctcggcgacggcaagcgttaacctgagcaacctccggctcgaaggctctagagattctgcggaaaccgccgccgctaggtctcaaattatgcgaaaagcacgtaccatcgcttcgaagatgattcgagactctccccaaacctactatactacctcagaacgcgagacagttgcgacgatcatagagcagcacctcacgggcgacgaccatgcaatatacttacgacacgcataacaaaaatgactgcaccctcttcataagcctgatgttctgataattgcctggaactgatacaacgtacacgggctgtgagtagattca

SEQ ID NO: 75348 - DNA, 431 bp, Oryza sativa
  unsure (1)..(431): unsure at all n locations
tggnataagtgtgatgcaatgtctccaacaggtgcatgtgcacaacataaaaggaggagaaatagggtggctcatgatcttgctcgaatggcaatgagtgctacgtctagtgctgactggagactgtatgctccccgcccaaatcctatactcgttaaaccaagaatgtaggagtaatcatttattcagccaatggtaaaaanaaaggtattgggcctactataaccccccaccccaccaaaaaaaaatctattaaaagacagcatgatgatgcaaggatcaacacccgggcaacaggctgattttccattacgggccttcaaggcccataatactactgatntacgtgcgatcaatcaaacatacggtgagcagagacgacgcttgccaagaattggtgcaggcaagtcacgggcaagaatcgaatcgaa

SEQ ID NO: 75349 - DNA, 416 bp, Oryza sativa
  unsure (1)..(416): unsure at all n locations
tgtcttattaatttgtggggaacaacctataggagccggcccagatgtgacttcatttcttgacggtttcgatgatctggaactgccattttgggaatcttcgagctctcaagatgctgcaagcacacaggtgacagacaatcaatgcgaaatgcaaaatttcattgtcaaccatcaatttttgcacgagccaattttaggggttaacttgggtggaacagcagcatcaaacacactggaatgtgagcatgatggtgcgttacaagcttgtcagtcgagtgatcaagatggtgatcagaatcaaacatgccatgatgggcactccggggatttgacaaatcttagtatcattagcactcaagatagtttaactaatggcaaaaatgcttctcagaaaaggacanactgtgaagatg

SEQ ID NO: 75350 - DNA, 345 bp, Oryza sativa
tttcatgcaagtagattcaccaagagcctgtattaccatatcatcgaccgcttttttcgatgccccatcatatatataaacactgtcttgaaaatgagatccactaacaatgttgtatccgatggagacatctgcaggggggaccaatcaatctttataaaaacaggtttgctccatttatacatggatagaataagaaatgaaggtgtatcacccatacgctaacaagaaagatgagctcgaggtgttataacttaataagggggcgggtaggatattacttatttatccgcctcggttgttgtcacaagtttctaataatttaacagcgtacatagtgtgtgg

SEQ ID NO: 75351 - DNA, 367 bp, Oryza sativa
  unsure (1)..(367): unsure at all n locations
atcttatattacacccttntctggtcggtcaagtgaactgcatcaccaatatatgtaacattcaaaaacttatgctctgtcattttccgctcgcacgtttttcaaactaccaaacggtacgtttattacaaaaagtttctttacaaaagttgcttaaaaaagtcaaattaatctatttttttaaaaaataactaatacttaattaatcacgcattaataaactgctcaggtttccgtacggaggggatgggttcccaatccatcctatggaacacaaccttaaggctgtgtttggaactccaagttcccaacccctcttcctcgtttttcgcgcgcacgcttttcaaactgctaaacagtgtatttt

SEQ ID NO: 75352 - DNA, 417 bp, Oryza sativa
  unsure (1)..(417): unsure at all n locations
ggcaatngactcgtcccgtgtcacttaatcacctgcggcatgcattctgtttcttactaatccaacagaagctatagacggactcaccatgaacgtcttacttatactctaactatctaactaatctatacttgagagctaggttgaaatgagataactcattgattggactcccacctggcgagaacatcaattgactctgaataagaggggttgaagcaagacttgtactcagcaagctattatattgagtaatgaatgcacgaaataatagtaattgagtacggctatattaagctcgttaatgcatagaatgtacaagacgaaagcctgtgatgcttgacatgttgtagtatttataaaatcttgaattatgtttctaaccaagatgccatagtcgagtccgatggctcatac

SEQ ID NO: 75353 - DNA, 449 bp, Oryza sativa
  unsure (1)..(449): unsure at all n locations
gaccttnaaactcagcttgataattccctagtactttatgtcaagaaataccctttgtgtccttgttcaactgtatgcaatatagatccacaatggtacctgtatcaatcaatcgatctatggcttgataaagtctaaacatgccgtgcttcgaatcgttatttttcacttcaagaatctatttcatctatgacaaaacaattcatcatggatcactgaaaattcgtcacagaaattcgtctgttgacaattctacttaccatcatctattgagcgccccaaattaaatctgccgatggtttctccgaaattgtcacggatcattacaatctacgtacgtttttaacccgcataaaaacgatttgggctcgtgtatttcatccaggcccaccttactcacatatggttgcaccgtgcgggcaacatggacgtgacctggtcgtgacaca

SEQ ID NO: 75354 - DNA, 402 bp, Oryza sativa
acaatataatggaactgcgccctaaattgatctctctggtattcaactagcacgggagattcctattgaaattggatttctatctggactaacgggttaatatttgtcccgaaatcacataagatggagcattccacaggagttgggaaacttaataagtttacaggtgcttgatctcttcatgaatgatctgtcaagcccaataccacagtgctacctgtcattgtctggcttgagccatctgaatttatctacaatgacctttcacgagctataccatctggaaatgaacttgcaactattgcagacagcacatactttggtaatgcacatacaactgtcacgaagctgattgtaccacacaaggaagcattaactatactttgataccggtacatactt

SEQ ID NO: 75355 - DNA, 440 bp, Oryza sativa
cagctcgtcccggatctctaagcgactgcagctgcaacttcttctctctgattttgtgtgtctcaggtgggagaaattggacattgtgccattcccaataagtggtttcgctggaatgccactccgctgaatcgattcgctaaaaaatcatccccaagcggtgcccaacattttctttgccacattcgccatttaatctcttttgctgctgttttcgcatttgggctgatgaaaatgcccttgtgctatgtttcttctatctgaggtgagagaaagcggattgagccgctattatgtctgagagagaaaggggatccccagatccaatcgctcctctgtcttggtcgtcgtcgccggcggtgccgtcgccatccaatggtgctagcgcgtgggaggtaggagcatagtggcattgatggattgcacctggcacgagttag

SEQ ID NO: 75356 - DNA, 123 bp, Oryza sativa
ccgggagcatgagcacctggagacaagcggaagaaaacaaaccgcgtcattggtcctaccgaagcgaacaaaagacagcggacacatacagagatcagaggaacccgtctcataaagagaaga

SEQ ID NO: 75357 - DNA, 371 bp, Oryza sativa
  unsure (1)..(371): unsure at all n locations
agcttacctgatagttcntgtgccagatgggtgttgagcgcgccgacattttcggaaatcgacatttcattgtcgttgagaatcaccagcatatcaggacggatatcgcccgcgtgattcatcgctttcaacgccatgcctggggtaatcgcgccatcggcaatgacacagaccgtgcggcgatttatgccttctttttctgcagcaaccgcaataccaattccggcactgatggaggttgatgaatgcccgacgcttaatacgtcatattcgctttcgccgcgccacgggaacgggtgcagaccgcctttctgacggatggtgccgatattgtcgcggcgtccgggcaaaatattatgcggataagcctg

SEQ ID NO: 75358 - DNA, 393 bp, Oryza sativa
  unsure (1)..(393): unsure at all n locations
agctttggatgaatatgtaatttgaaatgacgttgatcaggccgcagccgacgtaagtgatacttgaagaacaccatcngcttcgcctaagcaaacctctccgactccttctgctccgggtcacttctcaagggtaagtgtttcttgttaatccctttcgatattattctggcttatagncgatcattcccaaagcttataattgcagaaaaagaagactgcggtgaataataaatctgctgcaacaacatctataccaggtccactagtaagatagttttaacttttcattagttaattttctagccgatactattctggcacttgtttctttcttgcttcacctcctcctcctgcttctgttcaacaatcatcaagtgatcagaccccttc

SEQ ID NO: 75359 - DNA, 401 bp, Oryza sativa
agcttaattatttttataacaatattctattttgcttgggtattgttagggatatatcttttctggctaattatcttggttttccaatacatttacgaagctgactaacaagaattggaaattgttacgggaaagaattgagaaaagcctaagtaactggaaaggtaaacatatgtatgtgggtagaagattggtttatttaactttgtattaataagactaattatgtttatgattctttttgtttgatattcttagaggagtgcttcacaagattcattattatagatcaattttcttttggcaacggttaaacttaataaaaaaaatatatacttacaagatgagatgtcatctgtcaaccaaaagaatacggtggactagcgtttataacatagata

SEQ ID NO: 75360 - DNA, 435 bp, Oryza sativa
ggtgttccaatcagcaaatgtagaccgcggctggctattctaaccttgttgatcttcataatcaatctgaatgtgtcacataaacataggaaaattcataatgtaaagacattacacacgacataactaatttccagataaatattattccaagagtatcccctccattcagtactatagagtttatttaacttgcataatgatatgagttgacaaaattgagaaaggtatgacaggaaatattcttagtatcctcccataaatattcaaaaaaaatgaggatggatgcttcaggtgggtggtaaaaaaatttatatgagggcaaatacaggtctagagaaaattataaatttgaaactaatgataagcaccatagaaggaatcctaccatgggaacaacaatatcctttttgtcgtgctcctcagaatggtgta

SEQ ID NO: 75361 - DNA, 403 bp, Oryza sativa
  unsure (1)..(403): unsure at all n locations
cttcttattgtcctagctnttatcgacgaaatagcacaactactcatatatatcattaacgacaacacacacaaaggcggggaaagaagaatcgatatcaacgaatgccacaaagttctaaaataattatggttacacatgattggagcgagcacagtctttccatcattcagagggttactctagccactgcgggttaaatccaaattctgttcaaatatgtatgcacgcacagtgcgcgcttcaataagctattgaatattttaatattatggaattttacaagaatctgaatgctataaatgctagaacgtttgctaagggtatgaaactcgccacggtgtgtgagtacacctatctcgtgtcacaaacaaaaatgggtggctctttgatctctatatgg

SEQ ID NO: 75362 - DNA, 399 bp, Oryza sativa
  unsure (1)..(399): unsure at all n locations
atctttgatcacccaacagacacaatactgagtgggcagaagattgggatcaataagatcaccggcgaataccaggatcgtgtttcttggaaagaaccagaagatcctgcaccaggtcctttctccaaccatgtagatctaattagattgaaccaatatgtctctctctggaatcaatctaaagtttattggcagtctgggaactggacaggacaagcattcacatcgatccctggaatgccactaaatactgaatacaattatgttntcattaataatagtcaccagctcaagtttatatacaccacagaggatgtatccataatcacaagaatagtcttaccgtaacggcaactccaatgcctacatggtccacaaatcagagaatggatgtacaat

SEQ ID NO: 75363 - DNA, 328 bp, Oryza sativa
cgggatactactgccggggagaaattatttttggataccacattctggagatacttacgcaggctgaaaatggcaactgatctttgaacacgcactgtccaaccgcacaacatggcaccagagcaggcggaaccaaatttcggatttggattacctgatggccactgcatcctttctctatcttgtagtacctatgccttctgtgaaacgacccatgcggcccgacagtaagacatttctaactgccgtcatttggtgaacttcttgtgttgttagctcataactacgatggcggctatcccttacaaaacacaaagccagtatctct

SEQ ID NO: 75364 - DNA, 419 bp, Oryza sativa
agtttatttatgtagaataataaagctagccactcgccaagttgcaaagcatttctgtaagcaaagagaagttgaaaccagggtacgtgcacgaaattatttaaacaataactaaaataaacaacagcacctttgaagatttgagaaatttggggtaaataaaacataaaaactcagttgactcgcactaattaatttatactcctactacattataaggccctttcggtcgctgacgagaggcataaataggtgcgttacaactgtagaagaatctctaccttacgctcttacagccatgagagataggtgcctgcactttgttatgcaagccatactcgcacactacgcaagcagaacaacaattgcctttcgtgatcaattcagttactattatgaataatctagctttgcatcat

SEQ ID NO: 75365 - DNA, 430 bp, Oryza sativa
  unsure (1)..(430): unsure at all n locations
tcactatagataacccatgtgcaccagcataacgcttggttttgaaggaatgggttgcaccacaatcaaacaatattactgccggtgtctagttgacggggaatgtgcccaatataacctttggtgctgactgcgcctnctctgcagatgcatgattaacacgggcctgaacgaacttgggtccagcacgtcttggcttcgggcacttttcaaccgtgtgtccgggtttgttacaattgaagcagagttcgggtttttctcccaacctctttggctgttctggcagagctggctgaactgattgggttggaatctttagtgaactctgagtagggttgaggctgtgctgctcactggtgttgtgactgccactatggtggttcttgttgaagctacccgggtggtatggaccgtgctgcatgattaatat

SEQ ID NO: 75366 - DNA, 400 bp, Oryza sativa
  unsure (1)..(400): unsure at all n locations
agcttgtatatcatgatagtatgaagtaatagttctggtatcttgttttaaacattgcagtttgttgaacaaaatgtcagcataatacatgggaacataaacatttctgaaatatcgtttcaggtctttccaagattgtggtattttgttatgcctacaaagatgtttccaatcattagaagcatgtttaattaaaacactagaggcacacataaccttttgtttctcagacaagatatgcttttgaaattcactatcaaccgctagctcccaattaatgtaagcatgaggatcatagtttccctcgaaataaggcagtgcagatttgatcttacctagaacatcatcacttacctcataatggtcatgtngatcactcctcatgtcttgatgaagatgt

SEQ ID NO: 75367 - DNA, 423 bp, Oryza sativa
ctagccctaactgtggcagagatggccaaggaataacctattatgggagctgcaacctatttctggtccactgctatgaatgcttttcttttctctcaaagacccatgaccccaactctcttggatattaaaatgataacaggcctaaatatcactttattggctaacttggccagtttgaataccaaatccacccatgagttcaaaactagaagcatatgtggttggacaaggtatgctgcaaagaacatggttactggatcgatttctactagagaacatgtagccttcctcatgatgtggcttgaaaagttcttgttttgtggtccgagctgtggttctactgccgaatggcaacatatagctgagaactcggtagaaaagaaacaattcctccatggaaaatacttgctgggctaactg

SEQ ID NO: 75368 - DNA, 360 bp, Oryza sativa
caccataaaactcagctggcgccaccaagaggatgagggcttatattaacacactctccccctacctggcgcgccagatgacagagcgtgggtctccttaccgggagaccgggcacgcccacctctgtcggttctgtcggtggcgctacgtgaggttctaaaccctccatctgtgggatgtttcgcaagagagccaatgcacaagacaccggcgaagttaaacaagttctgggccgctgaaaacgaaaaacctactcctgtgtatgggggatctgtgtgtgaaggagttacaaagagctgaatagtaagagaattcaagcctcttaaaccctctttctctttttctttttttactctcta

SEQ ID NO: 75369 - DNA, 341 bp, Oryza sativa
caatctgcttcaagatcttgatctcatccatggcccgctctgtgtagtgctgtgcactcttctgcaccatcaacgccacataatctctgcatatatataaccaaccaattcagaaacacaaagggtgtataagaacagatacattccgtgtatgatgatggtgggattaacgaataaaacagtactcattaacaacgaaattagccattatgataccaccaaagcaataaaacgaacacgttgcgggtacaaaccaaaccgcccgcaatacaccagatgattaatacgcatccaggtcgagatttcccacaaatcatcaccaatctatgaagggaaaaggg

SEQ ID NO: 75370 - DNA, 522 bp, Oryza sativa
  unsure (1)..(522): unsure at all n locations
gatccttagagcaccgcggctgcagctnttatgaaaccgagcttggtccggnggatgggagtcgttctgcggaagaagtgtgaaagggtatcattaacatcaggccggatcacatccggcctggtgtgctaatgcctgcaatgaatgatagtcgcgtcttatcatgccaccattataaaattatcgctgttttgcggtacgctatcgccaggttatgccagaatcataaaaaagcaggttgggagtcgtcagggtgcagcacgagacaaaaatggaaaaccagagctggttgaaaaaactcgcacgccgcctggggcctggtcatgtcgttaatctctgctttatcgnggtattgcttntttccaccttgctcacctggcgtgaagtggtggtgctggaagatgcctatatctccagccagcgtaatcatctggaaaacgttgccaacgcgctcgatangcattngcagtataacgtcgacaaactgatctttntacgtaatggcatgcgcgaagctctcgt

SEQ ID NO: 75371 - DNA, 436 bp, Oryza sativa
gcttgcagaatctgggagttgaagatagcccatgatctactttcagttccatggcgggtttgccgtcttatgttgggtatttactacagaaataataggctagattctcttgtcaagggatggatcttaagtctttgtccatcaagtacttgttttcttatattttaagctaatgatccctagtagaaagtgatgggtcttgagtgatcaatgatgccggttagactcttacagattctatattatgataaaacccacttatgtgtatttcatttccctgtttgtgcttatgatatcagctcttcaagaatcttgaagcatgtggtcagaaacctccaagcaaagatattgtacggaaagttgaagacacatatgagatgcttgtgctattagaggagaaaaaggaatggcttgagaaatacaccgaatgtgttga

SEQ ID NO: 75372 - DNA, 408 bp, Oryza sativa
  unsure (1)..(408): unsure at all n locations
tgctcaccgcanacaagacaacattcaaatcttactanggcctngtcaataacatcttgtgtggcttgatgaaggaacggcgcaatttcccaacttatactttttgtctgggaccaatggcacattacttgacgacactacatgttaacagctgaagaaaattaaaacagatctttcacaacagaacagntgtatggcagcactatgccggcacacgtgttaagcagaatattggcaggtgagagtactttcggttccgttgcacctgctacaaaccagatcacatttttggtagtgaaagtttacagtctaaactatacagatgctctatggtgaccaactctagaatattgtggtgtcacaatggtttgttctacactctatgggtatagatagttgattgaattt

SEQ ID NO: 75373 - DNA, 446 bp, Oryza sativa
agcttttatgagactttgccacataactatgatcataaacaggtattgattcataatcacggcaattgaaaagtgatgctgaaacctaaaaaagggaacacttgagtgagtggtacaccagaaactaatgcatgaaaattgattctctcccagtgcgtcattatattgataaatgaagggcaaagaaagcattctagtactacataaaccaggtactctaacatactggaacagtacacttctggactcaagaaaaggctaaagaaagagaacctactattttcaaagaaaaaaaaatcaggaaaagagcaattagaggctggatttatttccatataattatcaaaaaaagaaggaaaagagcaatttcgatttctgggttctcaatagaataccttcttaaatgcttaacactttgagatatataagaaataaatgctcaaaca

SEQ ID NO: 75374 - DNA, 404 bp, Oryza sativa
  unsure (1)..(404): unsure at all n locations
gggtctacatntaagaagaaagggaagaagaccctattttctgtgttctcaccaatcaagtatgtgagctggtacccacgacgcagcgagtatccattatcataagagggtgatccaatcagaagaacggagaggtctaacctaatgttgtggacatgtctcgaatttaccttggttatgtgcgaatgtcatcgtcatcgacaatgctaaacctataccaatagattggtccacaccaagttacttgtgtatgtgacacgccatgagtttactgtaatagaaacattctacttgcatgtctgtacagcgcatttgtttgtactagtattagacaactatatctgttctataggatagttgctttaatttcattcatatggaccatgatattgcaatcctacttc

SEQ ID NO: 75375 - DNA, 413 bp, Oryza sativa
  unsure (1)..(413): unsure at all n locations
actcacttgctgtttataatgagcagagaaatatacatatgtttacagggttagccaaagaanaacgaatagcgcacaaaaggggaattaagaaattaagtgatatctcccaaaattctaagctcttgtagggttagtgcccctgctgtgactcatgctctctcttcctccctgatctttgctagaattgaagatggtggtgacgcanagtttcggaaaattcttgcattgcgttcgcaccagatttcccataagaatagaataatcaaagtcctaagaggcttgcgggggggtgtttggagacatcgctactagagttcaccgctgctcaatcgagtgacaatgttcccaactgcccatcttgagggcagtgccttgtcatctctagatttctgcccatatatctctttgta

SEQ ID NO: 75376 - DNA, 416 bp, Oryza sativa
  unsure (1)..(416): unsure at all n locations
tcctatgcacttgaatcagcgccccagaagccagcgagggatcttctttctcgaattgaatgccctgtcatgggtgctgaactccttcctcggcttgaatgctctgtcatgtttgttggaggttgggtcacctgcccgcaatgaatgctccgtgctccccttacgccggaccttcgtccaagctgncttctcagcggcggcagggcccctacctttcttcacgacgtcgcgccacgagccgaactgcggcttggatggtggccggcgggcaccggaatggtggtccgccgggtggtaggtgagagcctcacgccccatcgcttcttcgaacctctttatcaattntctcatctccagctataacatctgagattgtcccttggtgtcatgttttcatgcctgggtgacacagatac

SEQ ID NO: 75377 - DNA, 370 bp, Oryza sativa
  unsure (1)..(370): unsure at all n locations
ntgttgagcctaatacccaaagaagctattaatatctttcagtcctcgcaaactaagtagaaaaaccaaacaaggcaatgataaaccaagttagcaaactgaattgataaaaaaaatcacactccattattatgatgatagcccccgactgacaacttcaaggaaaaaacttgatgtttgacagtcaaaaatagggaaatacagtgataatagtaagcgtagaaacgacgaagatgttcaatgttccaagagttgtcgacgagagtgccgtcttcgcgcttgagtcgatatgaacctggccgggtaacttcagagataatatatggctcctcccatagaggagataactcgtgccgatctcgtgtgggtt

SEQ ID NO: 75378 - DNA, 414 bp, Oryza sativa
  unsure (1)..(414): unsure at all n locations
aacaacttcaacatgccggtctacatgccgtcaacgcatgaagngaagaccatcatcatgcggagcaaggctgttcatcatcaaccagatccaactctctgaatcaaactgggatccttacgaccatgacttagaaggagaggttgtgctctaccccgcgcacagcgggttgaatgtcgcgaggtctttgaggacacagttgaggcgggtgctcactacctatactggggaatcggatcaagatgttctcttcttaaggatcgccagtaatggaagcaaataccttgacaaaaggaacggaaagcactatgtcattgcactgtcattggccacaacatatggagatggagctctatagatgatgaagatctggctggacatcttacttcctatgatcatattataagactttct

SEQ ID NO: 75379 - DNA, 496 bp, Oryza sativa
  unsure (1)..(496): unsure at all n locations
gacacctcaaactatgcttaccaacatatagggatttctttcttcatttgaaccagctcatccttgttaagagttctgctgcacaatttcctaagaaacatccncaactcagctattgcttcataaatatcactgtccagaaatcctctcatggcagcgggcaaaattctntgcaaaagaatgtgacaatcatgtgttttcagcccctgtaccgttgttccctcagcatttaaacatcttgagatgttggaagcaaatccatctggaaacttgacctcttgtaaaaaagcacataaagccttcttcttgtcagtagacaaggtatatctagcatgaggcatctcttcatcctctctaaatgcagctcctttaatacccaatctttcaaataagcctagcttagctgttcttttgtctgcccttatattgaaattgcccaataggtctcacattgttttttcatggcatacatcagatatgtctacttaagttttca

SEQ ID NO: 75380 - DNA, 322 bp, Oryza sativa
  unsure (1)..(322): unsure at all n locations
agcttcttgcagtggagaaatcaaagtgctggtctgcttaagccaacaactttcttggctgttagaaatccagattntgccaagaaatctatcgcattacacttcacaaggccagatgaaatcaagtagtgcgcagcagctaatgttccatggccgcaaagttcactctgcacaacacaaaacgtttaaatttgagttatatgaacaaaataacaagaaaaagataggataatattttgtcaaacagaacttcagaagggttttttttataaagaaaagcttgctgcagtgtttattnttaaaatttgagaaaaaagttaaa

SEQ ID NO: 75381 - DNA, 452 bp, Oryza sativa
  unsure (1)..(452): unsure at all n locations
tgggggcnnttgtgatggtcgntataaaccaatttcgaccgttgatataactaacataaaggagaactagctatgcttgtgttggtatttcttaatgatattactagaaatataattcacagcaatagcgcagaaatatttctggtatattatggttacagagttcattcgcaagcgcacggatataccattgtagcattttacccgagagtatttcaagtntatcgctatttttttaatcccgtgggaagattataagagagagagccatactaataatttatatgttacttgcaataaccaaagtctaggcaggggttaatataatcaaaagagtagagcgacacttagcagaagcatttatactctcattcataattatctaagcttaagtggaaagaaagtagaaagatcatattcctatacttcttgtattcatatttattatcata

SEQ ID NO: 75382 - DNA, 437 bp, Oryza sativa
tgtgtgctaatccattctctgaccagtagtatctgtgctcattttggactacttgcgagatacgggtgtacggctccagaatattgtggttgatcgggcttatatccaatgtgttagcattccaattttttggcaacaaaccaaaaaataataaccaaattatattgcccttgccaaaatattggtatgcttgagaatggaagcaaaccaaacaaaccctattttgctgcgcaaccttgttattgctttatactatgacgttcacactgcatgagagaatccactagtagctggttcatacttaatgtttctcggcatgagaaaatccacttcacatcttgcttatgcttccgagggccagaccaagatgaaaactgcccgctcgacatgctatctctgaaagtggactaatgtgcgatttcatagcaacatgtcta

SEQ ID NO: 75383 - DNA, 369 bp, Oryza sativa
tgaggcatgcaagctgtctttagtagatcaatttccttaaccgaatatagcatgaatccgacaactgacgaactgacaactctcatcggctaatctcacgacttcgaagccgatgctgactctaagccgatgactactccgagcttaccaaatttcactgttaacagccgccgagcgaaatatggtctccacatcattcccaggcctgaaagtcgccatcgtgcagggcctatccttctgttccagtgatttcgcatgccacttcaaccttagggctggaccaaatgaccaaagaaattcaggtggtctcggagtgaacgacatgtatttcatttatatgctgacggcacgatcggggatatatattgt

SEQ ID NO: 75384 - DNA, 370 bp, Oryza sativa
  unsure (1)..(370): unsure at all n locations
tcctgttcagcccaatggccgaacaagcaaaggcgcacatcctctctccgagtgttagcggtgacgacggggagccgaactcacgccgtcgagctcgtactccaccgccccctccacgccaaagtcctatgcgggaggaggcgctcgagagggtcgaaggatccgcgactncgacatccacgggtgatggtgaatggcggcgagatggggagcgtctcctcctcgtctacggcgacggcagcacgctccagggcgcgctcctacgttacccgcccattggtcctgacccggagtctccagcccaacgttggctggacgacatggccaactcggtcatgacggcgcagcagcgcctagatgctggtgggcg

SEQ ID NO: 75385 - DNA, 470 bp, Oryza sativa
  unsure (1)..(470): unsure at all n locations
atgcctgacataatactattatactcgattaggacaagaatgtgtgttgctagattctttgcaccacgagtcaaaggatgaaacaaattatatatacttttaggtgccgaaatcaaccagacttcctcctcttccctctagtacttggtaacagagtcaaacaggtcatcttcagactgtttaaatttgtgtacactaatccacgattttagttccagttagtggtatatattggatgacttgatcaaatcattttgaaacagcacatgtccaaatttccagctcttttaagcttaatttttcatgcctgacgctcacgtgccaaagagacccattctcgacgacatgcanagacccaccgttgcaacaaattatgaggaanaatatgcatttggttcagaagttcagaaccgcanaactgaaccanagaacgggaatttctaaaattcaaatcaagtcaagcggagaaa

SEQ ID NO: 75386 - DNA, 379 bp, Oryza sativa
  unsure (1)..(379): unsure at all n locations
cattcgtgctgcatatgtaccacttcaaataatcccttgtatcttttgattgattctgtactgttgcagttttctgaaagctcttactcgccagctctttcacatgtaaagaagggtgattgatgatgcagtatctacagctttctttgctgaatgtgttgttccgctccaatcttattttcaatctgcagaaataaggctggtatgtaacattttccttgtacattgaagccgaatttgttgatattctctatgccatatgttcaatttgatttatcctacactgattgtntagaatacctaatcaccgatgaataccttataatccaaactacactatatgacttttctaanggcatggaagcttctctaaatctct

SEQ ID NO: 75387 - DNA, 353 bp, Oryza sativa
  unsure (1)..(353): unsure at all n locations
cctgangcatgccagcttngatctctctctctatctgagctctaagtttagcctatttctctattgctaagnggagcagaatagaatagtatctcggagtcctcgagtctacggaagatattggtatggctctagtaacttctctttcttcttttgtaacacttccggaattcaaagaatattcttctttatataccttcagtactctactttgtctgagtacgtggtgtactttatatttgtgccaatatagctgtatgactagcttatcagagaggagcagtggtgtgggtttaatgtttatgcacatgattgctctatattaatctagtggatatcgagtaatattttat

SEQ ID NO: 75388 - DNA, 464 bp, Oryza sativa
  unsure (1)..(464): unsure at all n locations
aaaatatatatatatataatatatgcctgccccttccatattcctgccaagaaaacataatggagagaatgtatggggaaaacgagtgaatcatttctttattccaccattccacaaaatatttnactttttcattttctaccacaaataaagacccttgatctangagtatgactgatgatcttcttgagtccatacttttggctttgcaatatatatgatgtacgtatgtcatgatttatccctaccgagctccacatatcagccttagaataggggtgaattctattacatcttgccttggtgaggattaaacaaaaagataatatatatccttgcgagataagagagaaaagtcaatatgaggaatagagattgtttgcgaaatatcataatatatccatgaatctgacataaaagcaagaatgactggaatctatcatcgtctatctatcaattactca

SEQ ID NO: 75389 - DNA, 383 bp, Oryza sativa
  unsure (1)..(383): unsure at all n locations
atgcagcttatgaagaccttgagcaagggcagtcatcctttgatcaattgcccctataattgaaaagtcattattattctngttgcaacttgcgttattagaatcacacacacttaacttgcttggcctcggnttgcatgccaaaccgacggacctacccagtagtcgtactaatgttcgtaggtcggactaccctgaatccttttcgctccacccttgtggtacctcggtattcgtgctctctgagcacgtataccaaatattccacatacaccgttgcttgtcgaaaatttgggaaatgggtttgtgaagccttcagaacccgacatgtggtgtcggggtgtgtgaaaataaaaagaattgtgaaaactcgcgatgcgggg

SEQ ID NO: 75390 - DNA, 492 bp, Oryza sativa
  unsure (1)..(492): unsure at all n locations
tttggcaccgcaatcctgcgcaaacttcatatctcctaggtatattatggttgnttctgatgttgacaatataaaacagtacaactggtcccaattcgttgtatatgaggtgaagaaagcagcagaatcaatgcccacctactttccgaataaagctcaactatccattaacgggtgtatcatctttctaatggttagcatttaaaactgacttgttaatgcagcatacaatcaacacacatattgtcattgtgaatcatttntgcaggtaaaatatttgagaaatctccagttccggaaggttgggatcacatgtgttaaaacatgtcacatttctcagtctgaggatgatncaaatgctaggatgattcaacaagatgtagttagtaaacataacccangattcccttccctcgtatgggaactcccgtatgtcgatccctgctgtatatgctatttctgctgcaaattactaattccgaatcatctgtc

SEQ ID NO: 75391 - DNA, 408 bp, Oryza sativa
accgggttcgccagccactccggatggatgacctctcggatgaatccggcctccagaagtcgcgccacctcctcgcggatgaaggctagacgttccggtgcctgccgccgcactttctgccggaccggccttgcgcccggccgtacggcgagacggtgctcaatcacctccctggggaccccgggcatgtccgccggtctccaggcgaagacgtcggcgtttgcccgcaggaaggagacgagcgcgtctttctatttgtcgtccagaagaccaccgattcgtgtggtcttggacgggccgtcgcccaaggcaacctgcttgatcgggacctcatcgcacgtgatcattccgctgcctcgggcggctgggacagaggtgctgagcctctcgtcgcacccgcgggcttgg

SEQ ID NO: 75392 - DNA, 463 bp, Oryza sativa
  unsure (1)..(463): unsure at all n locations
tactaagcttaggcttcgtacagttgcaactacatctgccattctactttatgacacatttctgcacagcttgcctatggtagataccacgcctgctcctatcaacacaaattacttcatattgacaaatctatgcccttttgcccttaactattttatctaccatgtccttagtaactactgtcccataagatatattgttgtgtaccattgaggtatcaattttcttgtataggtccttgaggtaggcctgtgtgccatgaaggataaattcaataataccaaccaatggcattcctcgcactcctcgcattacccagttgtaaacctcagccagattagttgtcattatgtcatatcgagaaccatcgatgttgtacaagaggacccactactnctttggctcattctcaattcaatgcgagagatttcanatcgatgatgccgacctccgtctcatact

SEQ ID NO: 75393 - DNA, 436 bp, Oryza sativa
  unsure (1)..(436): unsure at all n locations
tatcaagatatcgcatccatactagcactactttatttagtaatttctgctgccgcacgagttacgagttttcttttctgacatatggtattgatgaaatccgccaaaaaaaactttttcaaaataattactcatttcagaagggtgcaaattcgctcgtcctaaactaatatattactcgtttcaaaaaggtaaaaattcgtttatccgaaagtaactatactactcgttagacttcagtataatagtacaaaaaatcgatcggttgaaaagatcaccagaaatgcacttctttcattttttatactataggtacattatctntaaaaattataatcctagcacttcaattatgggagacccactgagctntaaattctcacataataagagtntaactganaaaagganaagaaaaatctcaagcgtcaatcta

SEQ ID NO: 75394 - DNA, 343 bp, Oryza sativa
  unsure (1)..(343): unsure at all n locations
tcactcnctctantagcattgaaacaatcatcaattattttctgccaatgaaaccccaccctcctaagcaaccaatttatcttacgggccgattgatgaatttcataaatcctttcatgtactactctcctagcaagcttagattgatcattatctaagtaatactctatctatttttcggcgatataatatatgaacgcttgccgccgaatcttccgatcaaccttaagtgtaggatctttcaaatatctaatcaaagaaattctccaagctatttctaactcatgggtacaaatgtccgaattcacaattaattcggccctttaatcaattgtaacgtgcc

SEQ ID NO: 75395 - DNA, 356 bp, Oryza sativa
tcacaaggggctggacatatggaaactatccaccgttccacaggccattcttgagaacttggtagtcgcattccaccttctgaacctactcacatcgttttcctgtatatgataacctttagtagagaatagcaacacaatgataccatttatatggttacaacgagaagcttataatataacacataataagagcatataatggtacagatgcctccaccatgcatagcatgcagaacatatgattcttttctcttttcacgaaaagacaagaagacacttatactggtcaaaatgagactaatatgccctatccgatggcaggtaacatatgtagataggctagggaatgatct

SEQ ID NO: 75396 - DNA, 501 bp, Oryza sativa
  unsure (1)..(501): unsure at all n locations
acacttgaaactcaagctttacagatatctttgtattctgttaaatattttttgttcatatgtttcatgaaggtgtcttatagattnttcttctgcttgtgttgataaatattgcatggttgtcatcatggtatgagttttcaaccagacgttctgttaacccatttttcagctaagcatcaagagatctgggacattacaagctctttggaggttcacaagtctgaaattgctgactgggaacttagtgctggaatatacatagacttcttcattctaagaaattctatgcaagagaaaagtaccatggatgatccagtaagtttttgtttttacagtttcaacatgttcctgaaagttgtggataacacaaccttgttttatctttcatgatcaacttgagaagataatgaatcatgcacactttcttggccggttaatgattcatgatagtctggggagtaaatacctgttgatgaatgtagatgtgatctatgttga

SEQ ID NO: 75397 - DNA, 430 bp, Oryza sativa
  unsure (1)..(430): unsure at all n locations
agcttataaggagggacttgaatcgatccattatttgttattcgatnagaccacaacgcttcggctaaacgagtatgcaattgccgaggataatcggaaatctttctcttaatcaatttgatcaaactctagttagatgcctcggcctgcccattagcttgtgcataatatggtgaagaattcaacaatttaatacccatgctatcggcaaactgaacaaactcatcagacacaaagattgaaccttgatcggttgtgatggtttgaggaataccaaatcgatagactatatgctcttgaacaaattgaatagcgtccctagaatcaaccttcttagaggaatcgcctctacccacttggtaaaataatcggttgctaccaatatgaacttatgccccttactcgatggtggattaatcatgccgatcat

SEQ ID NO: 75398 - DNA, 472 bp, Oryza sativa
  unsure (1)..(472): unsure at all n locations
tgtactagagtattagctagtanaatatctttatttacctattctgctctaaatattgcnccattggctatttctatagtatcctctaaaatacgtttgataaaccaaacaaatgatattactgccgatgaggcatatatagggtttgtgcttaatttatatctcaatccattgccgatctggttcaactacatcggctgggatcactaacgatatatcatcggcctatcggccgattggctatcggctgactcactctatntattngtttccttgctggtttcaagatcaaaccagccggcacgcccttaacacactcgaggctagccttggacctgcactgggattaagtagatctcccaagccaccgtgttttccgtcaacaatgacatatgngtcccacatattatttaaattctaatgccacagaagagccacatctatgccaggtaggatgaagaccaggtcaaca

SEQ ID NO: 75399 - DNA, 274 bp, Oryza sativa
agatatttcaaccctgagagggactttgaaaaaaattatttcggaatatttacatctactcgactcgtacggacattcaggggtttactcaataagttctggagtttggacggagatcactagcaacaatttatacgtatattgttgacaatagcacggagcatcctattatttattaaaactataaattgtgtcatacacggaagacattacagctcggagaaacttgagcatcttgtcatgttcgtcaacaactcgaacaatattgtctact

SEQ ID NO: 75400 - DNA, 384 bp, Oryza sativa
  unsure (1)..(384): unsure at all n locations
ctatgatactaagcttagtatgtcttgcactggcaccggctagctaaagctactttgtattcccttgtcgattctcccggcctctggcgaatgcccacaaggtcttgctgtgttttcggctcctcgtaagtgcctcaaaaactaatgacaaagacatcgcgcaattgctcccatgagtaaatgctgctagtangcaaattaaagtaccaagacctggctatgacatcaagcacgaggtgaagtaccttcgcctttctattctcgtcaccatgggtagcttcgattgcagattcttagatggagaggaacaccttcgggtccgtttctcccgaataccttggaacacgagggaacttgaactgaggggggatggcgtgtataata

SEQ ID NO: 75401 - DNA, 398 bp, Oryza sativa
  unsure (1)..(398): unsure at all n locations
ccctggggactgctgcaaccactcttgcagctggcaccgaactttaagacacacaatgaccatatcccttaggttctagatatagggatgagaacttctgtgcccctcaagagtagaatgtaacttcacatgtacctctggaaccatataagtcgcgcataatactgcaccaagacaagacatatctaatagcgaaatatcatctcacacattatgcatttctattcgagttaattctcaagataggcggngaatttgtgttttaccgtaacccaaggtcactacaatgagtatgaaaattgttaagtttgctttcaaccatcttcattcctacctgttgcataaacattgatgtggagatagaactggcatttttttaataccaccaccaataattc

SEQ ID NO: 75402 - DNA, 387 bp, Oryza sativa
  unsure (1)..(387): unsure at all n locations
ctgcatggctgctgctctntgaaagacgaggtctagtggaagatgctgttctggcaactcgagtactcatattctgcgctagcttgacatctctctttgaatctgacacctgatatcaccgatgatgtcgcctcctctaatggataggatgacgacggatctttagctagcgcgacgaggaaaacgtantgacgacgacgacgccgttgatcaccagcagcagcccgctgccgcccatggccgtgctgcctcgcgttcccctcgatgaggggaccaacctcgccgcctagctcgctatctaaacaacattgcatgaaagcactcttaaacatctatgcgctaatataattttcacatctcaataagcttttataaaggtggatctct

SEQ ID NO: 75403 - DNA, 437 bp, Oryza sativa
tgcaagcttgtctttcgctcaaggtccttgataaggattgaacctctttaagctgaagtacgcctgaaggtcatcatgctattgctgcatcatgttggtgaagttggcgaactgagcatcagccgtttggtaccattcttgcgtctgtgctatgtgttccgtgaggttgtactggatctcttctggctgcatatcaagggtatccattcttctaatgatgtcacccaagtcccaacgagaggaactcgagcgacattcacttgtagatggaggtactccacttgatctggggggttggttgttctcccattgtatgtgatgaggtgcatgccatcggtcctcattggcacttgcccagcttgagaccccgatgctatggtgtggagtctgtgtccattcgggtgcattcccacgtggttcctaacctggctcataca

SEQ ID NO: 75404 - DNA, 452 bp, Oryza sativa
  unsure (1)..(452): unsure at all n locations
accttgaaactcagcttattagactcggntattacatcgagatgatcaatcgaactgagtcaaccccggcctctgcataaaatgcacacaaccaaaaaagaaagaaacaactagaaacatcttccaagcacaaaagtttgacaaaaacatatatccaaaagcttacgcactacatggatcgcaaaatttcttcattacaatccatccaagatttctcgtttcagttcagcattacagaaattctntgagagtaaacactcagctgcggcgtaattatgttttcacatttacatggataaaaagaaacctctcatttcaatccatccaaaatttctcatttcaattcagcattacagaanattcatgtaagagcaaaattatgttntagcttggcatggatcgcatgattgtgcatttcagaacagcaatatgtgccttccaagtgtcgtata

SEQ ID NO: 75405 - DNA, 491 bp, Oryza sativa
agcttagaacaactataggaagaactgtttggatggagtcgtatgaaaaatacaggaattacacaaaataacgtatgagaaatgcaagaattagaagagatttatagatacagagtaacgtatgaaaagtataagaattagatgatacaatgtaaatctttcaagaggttggatcttatgttgaaaaactttcaaaatccttatgatttgagaaaatcctaggattttgaaatgactattcctttactccgaacaaacatgtttataaacattccacgaattaaaccctgcaaaattcctccaaaattcttttgtttcaaaagaccctctaagtaagggcatgtacaatggttgttaatagtggtctcttagcgttgctaattaggaatacttattgatatggaagaaagagaaataggagagacaaaacatcgttgttatgcatgacaacagcttaacaacgactcttaatcactataatatggaaatat

SEQ ID NO: 75406 - DNA, 409 bp, Oryza sativa
tactaagctaattgcgcacgctgccgacaacaggtcgaccggcagccggtttgtctgtcgtccaatcgatcgaccgggaaccaactcgaccaatgatttgtcctgccgatatatatacacgtaattgttcggctaatcatgagctacgaacgaaccgggctgttgacgaacacatgttatatatacctacatcataattcgatgtatattgagcttaattcggtccctctaaaataacctaagatgcttaatgcttaatccttcatggtttccattgaaatagctgttccctggaaaattgaagtcggcgtggaataatatccatgatataaaggcatcgaaaggctggaccattgctcataaagatgaggtctagtaccgctcaagtgactgacaggacaatgagcta

SEQ ID NO: 75407 - DNA, 151 bp, Oryza sativa
cagcttagatacctatggcaccaagttcttgcaactagctatctaacactttttctcgtttaacatattgatgcctggactattttctgctttatttttcctttggtatcatatgcctgtttatgaaagggtaccttagggcacaacacaa

SEQ ID NO: 75408 - DNA, 484 bp, Oryza sativa
  unsure (1)..(484): unsure at all n locations
tgaacaatggggtaaactacagatttacagtaattntntctatgatcatgcaagatctntgtcaaaagccttgacgtaacggtacatgcgcggtagattcngcttgatattnttacctgtcactcagtaatttactggaaagcaaagccaatattttcatctttgttgggttctcatcctggaaggtgaaatcctgaccactggagccttttcttcttcctgtgatcaccaaagtcagcatgctctgctccttgccaaaacanaaatggaaaagattcaaagcaaagagaagaagagttccaatcttctagacccagttgctagcaacagatccattgtagtaattttttaaaaaagtatttaaatattgggtttagaagactattgatgttcagagttnttacagtcaatggcaccggttggcttgccagggaagaaactcaattagcatatgattagntaagctctaactattatatacttc

SEQ ID NO: 75409 - DNA, 435 bp, Oryza sativa
  unsure (1)..(435): unsure at all n locations
catgcaagcttgaactggntatgtacacctatatattatatgcgggaatatataaagaaactgacactcacatcatcagttaccactgtgccccgcatgacacccttacaggatcttaggctcataaacccataacattcagaattttaatgtgaataagctttaattactcctgcacaaatctatgtataagattaagaactactacaactgtaatgcttgactctccacttctgaactgttgctgacctctgctgctgaactattgctgaaccgcaatgcttgcttcatatttataatgtaaatgtaatgctgaacgattgttgcaataaaattaatgcatagaacactctacattcttcttcgtatatatgggccatttggccttttcatatcatcccacatttctagatataagaagatatactaacgaga

SEQ ID NO: 75410 - DNA, 476 bp, Oryza sativa
  unsure (1)..(476): unsure at all n locations
tattgagaatggagagatcaccagattcacatgcttgaattgctatgcacgccaagatgccaagattattaaaatgtagtctttacttagagttctaagcacgtttaaaaaaacatagagttctaagcacaatttttttggtggatgcacactagatcaacaagatgtaaaacacactctagtggtaatcctctcacaaagtagactcttgaatgactctntgtgctcttggatactccactaaggttctcaggttgtatagggttccaagagacaaggacataagctanttaggtggtgtttggattactgggactatttttagtccctgttatatcggatgtnttgacgctaattagaagtattaaatgtagactaatgacaaaagccattccataaccncggactaattcgcgggatgaatctatcgagccctaaataatcatgattagcctatataatgctatagtaaacat

SEQ ID NO: 75411 - DNA, 391 bp, Oryza sativa
gcttggtcactgcccaggctttacaaaatttctggctcggccactgattggagtcttggtgacgatgctcctgtaatacttccccattctgtatctgctggattaacacagttggctgttcaaaaagatccatcttctcaagatgagtgaggttctcaataccttggggtatttcagttagctgaacgcatcggccaagcatcagctcacgtagatccacaagactccctttctgaaactctaggtgagaaagattaggcaggccatgcaagcttagtttcttaagcgctggaaaagaaccatctataaaggtcaagctcctcccgttgtatgcattgatgaggcttagatgtaatagtctggggagataagagagtagtccaatagaatc

SEQ ID NO: 75412 - DNA, 414 bp, Oryza sativa
  unsure (1)..(414): unsure at all n locations
tcagttgtcaactcaagatattgtatccacaaaggtnaccatatcagatggngggcagttatgttgcacaaaggtggttccaaatgttgagtggtggtgacaggggcaatagtttgctagtgtactcaaggtgttgggacttggcatgatatgatacttgggatggactggttggaacgattcagtccaatgtggatcgattggaagagaaaaaggatgagattccaacatcagggaaacaatgtttctttgacaggggtgaaggatcagacagatcattgttgacttatctcatggagacagatggcacggatggctaagaggggggccatatctcatatgattcaactctgtattatcanggaggagattgagcacccagagaagatgccctctgatgttcaacagctattg

SEQ ID NO: 75413 - DNA, 364 bp, Oryza sativa
  unsure (1)..(364): unsure at all n locations
atgacttgaatgatgtaccactgtgccgtgtgccatgaacgtactaatgtttattaacgcgtacatcatccataaatgctcgagtctctcagactgatcttatactgctaccaatcacctacatgagttaatatgtacacaggtcatgccatgtatctacgcatgcgtgaggcttattgtgattacttaattaatcgctagtgcatcttcggagtgcatatagacttttatttcctagactgtattaacaattggtatatgggcccgcgcacactgcacggctagtatcgacacatgctgttatacaagatcatatatattttgatattntattattcaaatatattgagaatatagcataact

SEQ ID NO: 75414 - DNA, 446 bp, Oryza sativa
acacatgaaactaagctccgtcgcgaaagagcggacggatggggcatggctctaccacgccgccgctggtgcgtggtgcgctgacagggctggatgcctcctactatctatcgcgaccaggaagaggacgactcggactcttactgcgactggcgaccgcgtcacgagtgtcacatgcctggatactgggacgcgtggtgtgggcgtgtgcgtgggcgtgggcgagggctaactgctcaacaagaatgaacagcctcgactaatctgaacgtcttgtcctgagttaacttcctttgcactattcaaaggcggattaggatcgactccgaagcacatgaaatactgaatttgatgggtctatacgacacatagttctaggaccactaattttgttttaagtggcgtaccaataactatgtggttggtccgggtgaacaatttttctg

SEQ ID NO: 75415 - DNA, 310 bp, Oryza sativa
gacaatgaatcatgggcgaaatgcactctaagatggctggccatggatgaagattgaagctgctattggtctatgaatcacggttaagagaattccttcatcttacgtagagatatgcaccatgttgctggctttactttcaaaagaagatcaccgagggaggtccgattatgcattgccatcttctgctttggattggaagcgagaacggcgaactaccaaagagattgccgcagaaatctctcgatatctttgcctgcgcccgagacaccgaaatctcttacttgccgggccggcccagctgagctcg

SEQ ID NO: 75416 - DNA, 422 bp, Oryza sativa
  unsure (1)..(422): unsure at all n locations
tacacaagagaagagaagaggaaagttgagggatgctatcgttactcgaccccaagatgagggacctgaagtgaaccttntccgttggtgaatgtgtaacggtgttggtgcggcccatgctggcatgggcgatgcacaaccggaccattcacgaagcggtgggctgatgggttactcatttggcggcgtgtctgtccagctgatcgcggcggccacccccaccgcctgcgggtgcggcggcgcggacgatccatgggcggtgggcgcgcggtcgcacatggttgatgggccaaccatgccacgatcccgcgtggtgtctaactgccactattcttcaccgacgagccacgagcagtgcagacattggcacacattgccacactgcttctagctttactagcagcagcaatgtctctctgtta

SEQ ID NO: 75417 - DNA, 346 bp, Oryza sativa
agcttggcaagaattaatgaacctcaattgacctattatgcaccaaggaaaaatgacaaaactctgaaattgtactaatcactaaatacaagtgtcagccctaaatcttatctaaattctgaaataggaaagtccatatttagaaaggtgatagtttggcaaatatgtacattagtacatgccatccatgatccatgttcttaccttgataaatactgtatgaaaagtgcacagaacataaagggagcaaatgattgaaacctgtaattgcagaaaagttcgtgtagcaaccattaccagcacagattcttgactcttgagcgcattgagccattgaaaatgggac

SEQ ID NO: 75418 - DNA, 414 bp, Oryza sativa
tcagaaagccacgttccacaaggcaagccacagttccaatctttgatcatattgatacctagtagagaaccacttagttattttctgcattgagtatctataaaattattctgcgtatgaattatttttgaagtaacttgttagtttagttattacccattattacattgttattattggccaaatccatggattgctatatcacgtcctttgataacctaggtgtagatttatatacttcacaataatattctagtggataagaccaccaaatatctatactcatatacatggtttacccgtcatcacgtggtggcgtgtcgggtgatataaaatgtgttatttgatatgagtcactcgcctggagtgatatggaatgattaattccggtgaagatggatgttgtggtgtctg

SEQ ID NO: 75419 - DNA, 476 bp, Oryza sativa
  unsure (1)..(476): unsure at all n locations
nggttctgcatgtcaagattagggtntctttcatgtgaggtctaatagtctatcacttgataattaatcatatctgtacttatatagtatatactgatggatgcataatattgtttttatatatataattgcatatcacgatttcagttagtaaaccatggagtcgacgaacaagtggtgaatgaaatgaaagacagcacggtcaaattcttcagcttgccactagaaagcaaaaggacagtggaaatccaagacaatggctntgaagggtttggccaccattacagaagggcatcatgtaagctggactgggcggagagcgtgatccttcttacgcagccaatccaagagagatacctcganatgtggcctacaaacccatcgtcgttcaggttctgtntccnctgtcaattaattntgcatacatacatnctacataaataaattgctctcaggtccattaattttacaatata

SEQ ID NO: 75420 - DNA, 325 bp, Oryza sativa
  unsure (1)..(325): unsure at all n locations
ttgtacagtaacttgtcgcagaacctactaacaatatcggtgctgattgcagcaccgtcttttgctgcgttntttactgtgcctgggggctatattgcagaaagagaggatgcatgcgtcccggtattatcagaggtgccggcattcatgtcattcatggaattcaatgctctaacattggggttctccatatcaacaacaatgctgcttctgttaactagtctacccgacagctctcagaggtatcgcaggtataacattcgctattccatcgcactcgtggaaacggngattntggctatggttagcacccgtgtttacgtgg

SEQ ID NO: 75421 - DNA, 305 bp, Oryza sativa
ccgtcagatatactggcccactttccctctctctcccgtgcccatagacgagacgacgtcatcactgtctcgccctctcatagccatgggtcattgacggactaccgctgtcctgaccattctttcaaataggaaaacaccacagagttcgtggaagggagttcgatggagcttgttcagagttcgtcacatatcgagaaagagttcgtcacatatctctctcaactcttgtcatcgatcgagtcgcattccttaaccaagggtaagagatgagggatatacccggttttatgggtgatggatat

SEQ ID NO: 75422 - DNA, 351 bp, Oryza sativa
aatcatccagcttatcataaatgcgccagtgtcgtacaaattgatcctccatgtattacattccaactcagtcagaatcagtactttcatcatcagagtcttcattactctgatggaggtcggtgttgcgaaattgctctacaacatcgctcgacattttggcagccgcatttcgcgcactgctgataaaatcaagggcagcctcttcacttgtcccgtctgcaaatccatcaatggcgtcgacttcaattctcgggtacaaggattttggcatcgccaatgccatgccagcctccatacttccagcattcttgatattcttgaaatatacttgcggagcaacactcatct

SEQ ID NO: 75423 - DNA, 409 bp, Oryza sativa
  unsure (1)..(409): unsure at all n locations
agttccgataccgccgcgacgcccatcgttcgcgttgggctccatcttcggttcggcggattatccaactcgggcctgtatctggactctgaagatacaaaagacgtactgttgccggttgggaattttccttgagatcatgtagtagttctcggaatgggactcgtcatcgtgtacgtttctacgactacgatgccggagtacacggctttgtcgggtacgattatacgatgtgccgaanagatgcagcccgatctaactcaggactagtgtgattcttgtattgtaagcgacgaagtgcattccagtcgggtaccgtacgatattgatgtcgaaagggcgtttaaagtcttgtcattgcagatacgaagaaaacactgagtccactctcacacggtatgagtacatg

SEQ ID NO: 75424 - DNA, 432 bp, Oryza sativa
  unsure (1)..(432): unsure at all n locations
ggatctctaagcactgagctgcagcttagtgtaatctgaccttttcagcgcacaccgaatgctcttgtagcccaggatttagtgatcgttcttgtcaattgtcataactgcaagcctgcaataaccttatagggcccggtttctgcgtggggccgttttcggtgggcatggatgtgtgctactccctccggttgataaccaaacggtcttaaaagaacaactgtaactttttattttctactacagtataaatataaaaaatcaatagcctttattttctactatagtataaataaaaataacaatagatatatgattntatggatgttgaagtacttcttaaaactaatttatacaaaactaattntacgtatgggcttcggattttagaaacaaaagctataaagttngattattttattttcaaaacat

SEQ ID NO: 75425 - DNA, 393 bp, Oryza sativa
tggctgtgtcaacatggttagttgagccggcctctgtactgacctcctatgcgatggaagttggatcagtgttggcactcaacgctgccacatctctagtggaatccttgctcaaggataaatccaccttggtgtggcgaaatgccttcagcatccgatcgatcttggtgcacaggtcttgtctaagatcttcaccgtcttgtacatgtcagtctcaggcttcttggattcgttgtaaagaacccaagtcaccatggctgctgatgtaattgatggtacagatgaagctgttgtagcatggaacacgcgttctattgcagcagcaatactcttggccgctggcctggcggtggcgcttcttggtcacattgtcatacacgaggtgtgcgtggc

SEQ ID NO: 75426 - DNA, 391 bp, Oryza sativa
  unsure (1)..(391): unsure at all n locations
gcttgcattcttcgacatggctattgtcgtggtactcgggatagcaaccattgtggtccagtcagcaaaatttgctgaatactccccgctgttctgcgtcttaatttatcttgagcaaatgtggtgggaatggaantgaactaaagaaaggattaagaaaaataagttcatggcaaagcctaccgtaaagttacaggtatgatacgatagcattctacgaanatatgggaaacgggtacatttntaaggtccagctggcttctatggatgtactcgaagagctgagaccactgcttcttgttttatgtttaagctgaaacagactagttcttttggaaaataccgaaggcccaaattgatgggggcaaacagacctgaacaatatcccaac

SEQ ID NO: 75427 - DNA, 386 bp, Oryza sativa
  unsure (1)..(386): unsure at all n locations
aagtttaccatcttcaagtattagatgttggctcaaaatctgatctgattatacctaatggtgtggatgatctagttagtctgcagcatcttgtagcaacagagaaagcatgctcgtccatcactagcatcagcaaaatgacctctcttcaggaactacataactntggtgttcaaaattctagcggctgggagatagcacaactccagtccatgaaccagcttgtacagctcggtgtgtctcaacttgaaaatgtcacaactagagctgaggcttgtggtcaaaactaagagacaaacagaacttataanagctgcgcctttcgtggactaatttacataaattgggtcatttggggactaacgtgccatgggatgaacgtgaaa

SEQ ID NO: 75428 - DNA, 414 bp, Oryza sativa
  unsure (1)..(414): unsure at all n locations
tgtcaatgagttgaaggaagccaagatgtcagcaatgcagtttctgcaagaatatgataatgagaggaaagcacgcgagctcactgaggaggtgtgcaatgaactggcaagggaggtggaggaagacaaagccgagattgaagccttgaaacatgattccctcaagctgcgagaggaggttgatgaggagcgcaagatgctacagatggctgaggtttggcgtgaagaacgggtgcagatgaagcttgttgatgcaaaacttactcttgatgccaaatacacacaattgagcaaactgcaacaggatgttgaggcttttattgctgcatgcagttgtgctagaggagacattatggttgtggaagaagcagagaacataatacangcgatcaaatctgttagagcacaagatat

SEQ ID NO: 75429 - DNA, 391 bp, Oryza sativa
agacttctcaatgtacttgctcattccaagccattgcaaccatccgtacctcagatttaatctcctaataaaaactttagatgtacatatcatatcctttatattctaaatcaatctattatccttatcctctatattatatttctctctccttcttggtacctatcccaagtctattttaatctccttcttgctatagggatagaggatgccctaattggcctaccgagtctaggacaaatcgatacgtgttcaccctgactgggtccctcggagtgctcgttcggcatcatctttcttctcgtggcagcgcgtctctgggtgctgctgtagtttgcacataacgtgctcaaggtgtggcggcgtgaatcagcatcaatagtacttatat

SEQ ID NO: 75430 - DNA, 422 bp, Oryza sativa
  unsure (1)..(422): unsure at all n locations
cttgcgagtctagggactatcggttggctaggaagtcaactttctcaattctaaggttaactnccgggcatatttgagttgcccttatattccttccaggggaatgtactatcattggtacacgcaaattttgggtgttccaaccatttcttttcacaaaagcttgcgatatgaaagaatgggaagctcccgaatcgaacagaactattgctggtacggagttgacagagaacatacccatcacaacgtctggagcatcctgagcgcgttctgcttgaatgtgattcacacggcctcgaccaaagttgttggaagcacgtgaaccttgtccacttgcctgagagctatgacgagactgacctttcgctggagtatgagatcttgcagtgctaccattatcatgcgcttgagttgtgttggtt

SEQ ID NO: 75431 - DNA, 387 bp, Oryza sativa
ggacaatggaatggtccctatcaacggatgcagattttccaaagggttggagaaaacccactcattatatatagtacataatactccttcagtcccaaaatatagcaacttagaatcggattggacgtatctatagtactacgaatcaaatactaggatatgtcctatccaattctaaggtgttatattctaggacggcggagtagtataatggaatagcatttcatccgctcgccaatataaacatttctatcggttaaaatatattattatagatataaacatttctagagtaatatttttcctatgctaagcaccccctaatattgcttacattatagcttcatcggtggacgtaagatacaagtcgcttagatctatagtact

SEQ ID NO: 75432 - DNA, 457 bp, Oryza sativa
  unsure (1)..(457): unsure at all n locations
gacacttgaaactaagcttgccaggtaactctaagtagcacaccactgaaccaagatgatctggaggtcctcgccaagctacccaagttacagtgtgntaagctccaacacatttcatgcatagtgagtgagctcatcttcaaggaagaaaatttcaaatgtctcaagtacctacttattgagggctctaactngactaatatcacttttgaggatggatcagcctgtgagctcgagaaaatggttttatcttccaccagcatagagtctgtctctggagttgatgtgcttccgaaattcaaagagcttgagttgaacaacagccatgtcccgaatgagttgaaagaagccgttgaaaacaataaaaggataattcttaaatgtaatgaaccatgaactcaagaccaggcaaaactgagatgaacaagaggatgaagacaatgcttgctacatccca

SEQ ID NO: 75433 - DNA, 410 bp, Oryza sativa
  unsure (1)..(410): unsure at all n locations
agcttctaattcgtcaacctcaactcttgccaatatggtctctcgaaggagcccactggcgtttcgatcttgggggtaaaaatattgttatcactgggtaagaaaaaactcacaacaaagtgtcaaaacagttactataatagagggtgattaataagggtagtagtttgagctgtggtagagtaatagagtgtggccggcgagcgacgatgcatgcgtacatgcattacgcggngcggngctgtgtggtccgatgaggcaactacttttccctgcttatctcatctcatctgacacaacaaagcgaaatgccaatcaatcagccaaatgaaaaggtggttaccgtgcgatgcggacaatgacatgtgggccccgggcgttacttcccgtgaccatcgctgtcaaatctc

SEQ ID NO: 75434 - DNA, 451 bp, Oryza sativa
  unsure (1)..(451): unsure at all n locations
tggctcaagctgcaatataactggtcggcttttggccattcagctntcagtaacaggacaggcccaaatctttacaactaagcgtttcacatttttttctctaaactttggatggcataagtaaatgttattngaccctcccaagggccaaggcttcttcctactttgtaggacctttactctacaggaatactgaaccatgctctaaaaaaggaaaacaaaggaggggggctatcacactccttcttcacgagtgcaagaacatctcttgtgattcctagtgcacaaagctaacttcttggcatgctttaccacanccatttccttggggattaattttcttttctcctagccacccttcaaatttattctcggtgctatgtatatgtgctaatgaattcagaaattgtcatacagaggtgggatgcaaagaaacacttcgcatgatctc

SEQ ID NO: 75435 - DNA, 405 bp, Oryza sativa
  unsure (1)..(405): unsure at all n locations
cttgccaagtcatcgtcactatggatttntgactagggattcttcaactactttggatctgggaagtcaaacccaaccagagtacgtgccccgacaagatcggaaccatcatcgtcatcgacaacttggtctatcgagatcatccaagcttcaagatacacggcgtaccaaaagatgtcagatcatatgatgtcgaacgagtacacaataagggaaatggtgaatcggtntttcaaatggatctactaatttcgtagatacatccggtatgtatctacaaaggtacgcaatattntatatgcaacttatcgtacctattntcaagagcacacaacattgtcagatcaataatttattatatttacctagagcatgtncttatacaatatctattgtgcgagtgtc

SEQ ID NO: 75436 - DNA, 492 bp, Oryza sativa
  unsure (1)..(492): unsure at all n locations
tgatacgtccaanacatcattcgtaagagttgccagaagatctctactctntagtatagtctcaaccattaggcgttgttcagcactaagattntgttctaaaaggagagaggacaaagaaacgattgctcgcataggagtccgcatttcatggttcattacagcaagaaaatcattacgggcacaaatagccatttctgcctcccgacgtgctgcatcaagagcaatgttttgctccattagtagatcacgggcccgcatggactctttcaaaatggcagcatgagacaatgcgaccgctacctgaatgagaaaaatgaggccatgggtttaggattttcacaattttcaagataacttagttcacaggtcacaccaacataaatggttaaatttctctatttaattgattctctagttctctaccaaacaatatcagactaaacctgatatcaccagattcaagatatcgggtatcagaaaatcacacct

SEQ ID NO: 75437 - DNA, 314 bp, Oryza sativa
  unsure (1)..(314): unsure at all n locations
tgctcaggcaccactgcttttcaaccagagcgctttctatccctacttcatccacagatcaattacgtgacaaagttatcttttgcatcacatttggcctgttctttgcttatggcgggctattagatcaaatggtactaataaggctaagatctcttcaaggcatattaatttttcaactctatgaacagagttgaagacaagaatctagctgccacaactcaggtgtgcagatagagcattctgaatgatggtcactactcantatcgcgaaaatcatgcgcaaatttgtctctatcctaactagtatgtat

SEQ ID NO: 75438 - DNA, 398 bp, Oryza sativa
  unsure (1)..(398): unsure at all n locations
ctattgatcattaaacatcgntacatcgtttgccaaagtgcttagaatataatcaggaggttcatcgnttgccaaagtgcttataatataaaatttggacacgaactaaacacagcaactgtctcctgccctctgtttcaaggaaatatttgacggtggttattgttgaaaaagtcgagacgacgtgtacgagaaaaccgtatgaggcatgctggccgatatacgtagcatatcaagttcttgacattntttagcgagatcgctctagatctccttcgaaatggaagaacttcactgagttttacagtcaaaatgtgctggcctggttggcaagagaatgaaagacgaatgggagttttaatgaggaagttgatggtgggaatggtcatgggaagtac

SEQ ID NO: 75439 - DNA, 475 bp, Oryza sativa
  unsure (1)..(475): unsure at all n locations
agcttaagaggagattggggatcaataaatggatataacgactacctttgatcttcatgtcagtgatgacngggttttttttgttgtaattgctctttcaagtggttttgatgatgcaaagtagagattcaaacgtgctggattttaataacagtgggccaacgacgggaaagtggaaggctgtttaagtgaacctgcttacatgggcctaattggtgtagatggtggtgccatgtgcagtcttgaagcgttgatttaagatctaacggtctcagctaattagggtgacgtggctcatcctcagagcagtcttatagctagtgggtaccanctatatatagaaagaagaaagaagagatacgtntagaaatattgctaccttattttaaaaatatcatgccaacatcgtgaaagttgacaagaaaaaatactctatacacatcagcctaaattttgggattgcttgattattatt

SEQ ID NO: 75440 - DNA, 451 bp, Oryza sativa
  unsure (1)..(451): unsure at all n locations
tcatgcaagatctcactaaccatcagggcaggggggttttattatgatttcccgagcataattatataaagggatgacaattagttgattactatctccccataaaatcttcatggaggtatagagcttatgctaaaagaaaagccccacaggaagtgaaataggttagttgcattgttctctcagaaatttaaatctttataacttaatacgaattgcagtgtttgctagattttacgtttgggtgttaagcttccacacttgtatgattactttgtctaatataattcagttcagtttgggagatggatgtttcatttttatactttttgcattatacgtatgtatggaagtatagcaaccagtgaagctaagagatcccttttaggcaccaatncaatggatttcctctcgttgcagagaggaccataatacacactancctgggatg

SEQ ID NO: 75441 - DNA, 374 bp, Oryza sativa
caaccagagcgagacaggtctcaacttggtcgggggtgggaagtgaacaatattatttatcaagatttgcacaactcccaaagttgggctcaaagctagtttcccaaaccaaaccacatttccaaacattcaaaggtgtggttgtcttcaaccaccagtcacttttagggactccctgtcccgctgtctccctgatagccacttgcctttccaaacatcagggttcccaaaccacatcactttttcataaaacagggggaaaataaaaactacgcttaggaatcacctcacatccgcccatgaccgtgggcacagccgtttcaacagttgtaacctctgcagaggggacacttaccccacacattactaccgat

SEQ ID NO: 75442 - DNA, 458 bp, Oryza sativa
  unsure (1)..(458): unsure at all n locations
tcggatgtgcctgtcctaccaagatatgaagacaacaacaccctgatcagatcaccgagccgtttcctatcccttctgtgtggtggttggctgatcgtagntgcacttgatactagtatcttaaagcaaaaggagcagtatcatttctacaaactgaaaagtgaacactgcaggggcaaacgcttagtttttcttaaaaaaatgtaaccgtgtaatatcccaattaaatgagactaatcctgagtagtacacttaaatactatgatagcaaaagtggttgcagtgatagggacactccaatctcactgagccaatattattattgaaggcatatgacaatgccattacttgcaaatgcagttcaagagttgccgtcagnccgtcacaggagaacaccagacaagtggctgcgttcttttgaacttctgactatacgttatttggcatgaaatgttata

SEQ ID NO: 75443 - DNA, 432 bp, Oryza sativa
  unsure (1)..(432): unsure at all n locations
ggatcttaagcactgngctgcagcttgataaaagagcattgtgagtgttatgcaaatggaataagattccaatgcctattttgttatcatcccaagaagcatctatattacatctatttccttccagcaacttttccattcctctctccgatgaagattgctccatatcatcatcctgcaaatgagggtgctcaatgtaggaagctgatcattgcctctgctgcaaaacaaacttgagatggctcctgaattntaccctaaaacttgagatcatttctagccttccaaatctgccacatgattgtgaagattctatttaaagtggctttgttagaacagttattggaaatgtaagcaattatgtgagccatagaaacattatcagagaaaatatcagtgcggagaataatgtcagaaatcatccaagtgatc

SEQ ID NO: 75444 - DNA, 480 bp, Oryza sativa
  unsure (1)..(480): unsure at all n locations
ntgaacttgatacattagacagcgtaagtgggtgttcctgtggacaatgtcatcaattgcaaaagaatctagttaagcttngcaattggatccgtggtctatactgcaagcattgaccatacttgttcattgggtggatcaattatctgatttttgaacgctatgttttatgcatctctattgccccaatttgaattatgggctatttctcactctagtttgcggggagcctttatctatgcgtgctggattctctgcggatctagttgataaagtatatgtcaaatgttaacaagaacattttctttggaacattcataatgatgtcaaatgattgttgcacgtgatgattttagtaacatagaaaatttctgaagtcgggaacaacacataataccttgcatctggaaaatgaagtttgcaattcttaccaaccaaaaataaacaggatgaagactaccagcactccaaatatatgtt

SEQ ID NO: 75445 - DNA, 421 bp, Oryza sativa
atcctcccagacacctgaggctgcagctgcatgagtccttcccatgacacatgctgtgcttctacttttatacatcacaccacgtgtgtctggcaatacttccaccaacttactaaacttctcataaattatacctttgacctcctgatcaataatggcatgccacattgtatattgacattgagggtccaaatctatggtctctccacctaaaggagaaggttcgaacatgccttctcgagctgcggcggagatctgtacatctgtgcacactaacttgcagaggatttttccctatagattcctgctgggcaacagtataattttctgaagccattcttataaacgacatgctcttgctcttgactctatcatctgtcattcttacggacctacatgggacaacatgtgcatgtcatct

SEQ ID NO: 75446 - DNA, 353 bp, Oryza sativa
  unsure (1)..(353): unsure at all n locations
gtgagagcaaagaggaagaaaacattcatggttgcattgatcctgaatgagtatatatggcaataaaggtaactgagctgcacagtaggacggagcagaggaatttgacagggggacgatttctttagctntttcccctctttgggaagccaggaactagctgtgatgtgcagaagatgttagcaaaatctcttgaagatctctaactgatcgtaattaggggtatgatggcatgttcaaagcataaggctggtctggtcttttgaccattggaataacattagagacagaaattgtgcatacatttggaacacgagtagtagtataattgcacacttctttcaaaagtcaag

SEQ ID NO: 75447 - DNA, 425 bp, Oryza sativa
atctcatgtcaactcctcccagctgctttgtgcatttttatgcggcatctcgtgtgcaaaggcatctatgcttgtacaggtctttactcataatccatctatgttattattggcatgaatgttgagttgttatatgacctgacaacttgttattggtaaagaccactgcttctaggcgattttgaaggagctccgctctgaatgggctgaccctggcgttgatgcttattctgctgctgcgttgacggctagtccatatgcatgtcctggtctgcgagctggtggatttatgggcagtcagggtatattgccgcttgcgcacaccttatagcatgaagaggtaactgatgtacctttgcttttataactagcttgtgcactacttgcaaccaaatttaactaccctttaaatgagttctggggta

SEQ ID NO: 75448 - DNA, 357 bp, Oryza sativa
agcttggacaagggtttacatctgtcgatccattggaagaagcagatataggtggtggaacttaaccaaggccgacttttgtaaaaaaaaatatgaaagccgattataaggttaaggtaatcgagctacttaaagagtatgttgattgctttgcatgggagtaccatgagatgccgggtcttaaccgtgagcttgttgagcatcgggtttcagttaaaccgggttttaggccttataagcaaccacttcgtcggtttaatcctttattatatgaccgagtcaaagaggagattgatcggctattaaaggcggtgtttattaagccatgtcgttatgcggagcgggtgtataacataa

SEQ ID NO: 75449 - DNA, 441 bp, Oryza sativa
tcactcatcttcctcagctatttcaggtagctcatatgagaatatggaatgaatctactacaggtggcatgggttcatcatcacagaagaatggcctacaaggcaattgcagatcatcaacaccacctttaagcatctctatggcctcactcatcggtggccgatcctgagacttcatttgaatgcaatgtagaccaacaacacataacttcttttccagctcatgcatattaaagccatgggaaatctcacccatatcttgttgaatgagttgattatacacccatgatggataatatgactggctctgagtcgacatctcctgcttagaagttcttctccctccagccatctctaacaaaagcatttcaaagctgtaaacatccgatgtgctagatatagcaccaaagcttcgagattcatctcagggcaatataccta

SEQ ID NO: 75450 - DNA, 431 bp, Oryza sativa
  unsure (1)..(431): unsure at all n locations
gcttccaagatgactactaccaccacaggctctacgtcgtcacgaccttcaaagaggagacggacggccagcctggaaggcgatctcttgacgcctccccagcaagatgaagatccactcgacacaagcaccaagacagcaccatgctacgaaagcgacgatgacaacgaggacattttcagctatgcttcccacgtactcgccacagaagccgcggctctagtttcgataacaacactgtaccgcaccagcgctatcgcaaaacagaacctcanagctgctgtcagaaccattgtgcaaacccagcacgaccgcggcaaactcatcgtcaccggcgtaggaaagtcagcttatatcgggcaaaagctcgtggcgacttgcaagtccatgggcgtggcggcgagtttcatgcacgcctgcgaagctgacac

SEQ ID NO: 75451 - DNA, 439 bp, Oryza sativa
  unsure (1)..(439): unsure at all n locations
ngacccagcttcatcctcgtcgtccaccagtagatcgtcgttcaatctactcactttatcgccagacccactcatgaaagcaagccgcgcttggtcctcgatctctctttccactctctccctctcttcatacttgtcgtcttccttgcccaatacaagccccacgcctccctctcgatccttactctattgcgccgcattccgcattctcacgtcgttcaaagcgtccgcaatggccatctcagtcttggcatccactgtcttactcatcaagtacttcatagcatctttctcagactccttcctctccatgcggtccagcatctccttctccgactgctctgccaatttcgcctctcgccaaacctcatagttgcgcttcgcacccttctcacactcatagtccatatgcttcggatccgtcttgaacgtgatctct

SEQ ID NO: 75452 - DNA, 263 bp, Oryza sativa
gacgctataaccgcctgaccccaagaggtgatggtacttcttcttgtgcggcattttcttttgttctttccatcatcgcctgcccttgttgccctgtcttgtaagaaacaaactcgtcccagtgatcccttaacttctggaatgtgttgaagtttggtgtctgcccctacatgatgtatttctggtagagatctcccttgaagctctgaaactgttctgccattttctttagagtccaccttttcactatgttctctataccc

SEQ ID NO: 75453 - DNA, 379 bp, Oryza sativa
gcttgccccagtatgtctgttgcacctccacaaaatatattctatggacaaagaggtagcgcagctgcactcctgccaagttctttccctgtaccacctgcagtaccaccctatggcttgcagtctatgcctggatttcctttgccatcgttaccttcaagaccacctcctccatcgcagataggtccatcatcatcgcaagttgggggccctccacttgtctctggattgttaagtaaccttatgcagcatggtataatctcattgcaaccacccagccaacctcaggtactcatatgtgcacctcattgccagtctctgatattgttctatggatacgcatgcagttgattctatgacttacattatacctgtaatc

SEQ ID NO: 75454 - DNA, 426 bp, Oryza sativa
  unsure (1)..(426): unsure at all n locations
tatagccagagggaggatagcgtaagcagactattgaagagtaagctgagcagaattcctcctcacgagatcgacttgtctacttacgagaatatgcatttcgaaatgaaaagctatccccagaaaacaaagaatacgaataggggcgtagcgaaggcgcgtagcgatgataatgttaacaatcttctggatgagctcattgctcggactcgcatatacttgttctatgctctacaggctaatctgagtaaagaggaggcgcgaagcgtgagatggacgagagaacacacacgatcggcacatagccttcaaagtcgtttttttattggtagacaccgagaagggagcccttgatcctagatcagtaagagaaagacgtaatgaaccggacagagactcccttgctntattcagtcatgacatgga

SEQ ID NO: 75455 - DNA, 360 bp, Oryza sativa
  unsure (1)..(360): unsure at all n locations
tacacatcactatattagaagaagaatggtttaatataacttcaacgcttcatatggtcgtagtcatggagaggctaagagaggggaacacaatccaaaagcaggcttgctgaaccaaaacaaactctgtaaaagaaaggacatgggtaagttagctaatgacaacagctaagtgcccaaaatatctcctagtgaagaaggttccgcctctagctagagcggcccctcttgcacaatcctatccaccaccttgtctatctatgaaagaacattgtcgaagatgtangaattctgctccaaccaaagttgtcatgtaaccaagaggacaagagagtcaaaactcttcctgatgtgctcatg

SEQ ID NO: 75456 - DNA, 436 bp, Oryza sativa
  unsure (1)..(436): unsure at all n locations
gctgaatgcccgggtcattttggttacttgaagctcgcccttccagtttttaatgttggattctttaactgtattttggatgtattgaagtgcatctgcaaggtatcactgcacgaataagattagatgttttgtctaaatccaccaaatgtgattattcttatacttgttccataatttatttaaagagctgcagcagggttcttcttatggagaaagatcggctagangttttgaagaaaatgagaaatcccaaagcagatccgctacagaaaagtgctatcatgaaaaaagtgagggacaaatgcaaactatcccgttgcccctggtgtggatcataaatggcagctacttttgatactcttttatcctcggctctcgcacttaaatttcttangaggctactatggcacctgctgctgcacatttacaaaca

SEQ ID NO: 75457 - DNA, 482 bp, Oryza sativa
  unsure (1)..(482): unsure at all n locations
gacacttgatactaagcttaaagttattataccctctagccgaccccatcagcacctcttgttctgcatgacgtaacatttcctctaggtcgattttgtcctcaatagaaccattgtcatgcaccatgtcttcaacttgtgttggaactacattttcaggcccgtccacttgttcttcgccatgacgtgtccatatttcgtacttgtccataaatccacgagttattaagtgctccttcactttaaaagcatcgtcaaagtcccaggttatttcattcttacagtcagcacatggacaaatnatcttcctcatattgttcttctcagcgtgtgccttggtaataccaataaatatagacacttcgtttctatatggagacaaaaaccttggccaatgatacatncattcccgactttccatatctttataataatacacgttaaatattggcacaacttatacttaattcgaggggttattg

SEQ ID NO: 75458 - DNA, 413 bp, Oryza sativa
  unsure (1)..(413): unsure at all n locations
gagatgccgcttctccggatggacgacggtgagcccattatgacgatcttttttgtgaatccgcgaccggngagccgagggcgaagcccgttatgacgagcagcaccgaggaaggagatccgcgacggcagcggctatggttggcgacggctacatggcagtggacggcgtggcaatcggcacatgggcagtggccggggccctcgccgggggagttgatgatgacaacgcaggcgcagcccggcccgccgactccgagacgaggcgctcgacaacgacgacaaagtgcagcccggcttctagatgaagcgcttgacgactacgacgacgcaggcgcagcccggcccgacccccatctctgagacgacgacggcgacgacacctnctactgcatctatggtggtggagagaga

SEQ ID NO: 75459 - DNA, 446 bp, Oryza sativa
tgttcacggcatctacgagacgctcgtggagctccggtgtccacctcagtcttggtttgttacatgatgcagttccagatgaagaccgagatgaactcaactgaactttagcaggagatcttgcatcctgcagatcctcctgatcagagcaagatgacactggaagagacataagttgcggtggtctgtcgtatatgttctaaggaacaagaaaattagtgattaaaatgcaaatctagccatgataaatattcacaagtgaacattgaaaaaacctcttgcagtagtaacttgatcccattaaactagaggattaataaacatataatttagttcaaaaatatcaatgatgaagctaaggaactcacatctaaccgaggactctcctcattgttgagatcgcaattcctagctgtcagacaaaactgaaattcatctgctattat

SEQ ID NO: 75460 - DNA, 340 bp, Oryza sativa
ggatcctgcagaacaaacatataggatgagtgagatgtgatataaatataatactcgagaaaaaatcaagtattttaaaatatttataaatatgtatttctcctcttggcaattttgatttccccgggcagatgattcattacgatgtaacgctctggccgactagtcatagcccccaagcaccgggagtcggcctatgcactttccagacatgcatacgagtgacatgagttcgccattaatggaacaaagtttcacgaatcagaatttactactcgggtacttttgccattattaagagcacgaaaataaattatcttatctctatgcttttgattta

SEQ ID NO: 75461 - DNA, 389 bp, Oryza sativa
  unsure (1)..(389): unsure at all n locations
aaactaagctgctgtctggtggtacgcccgacttccaccattttctgtcaatccttgggaatgcgcgagaaacgtcgcngtgaatcgggatctttgtcgtagttagaaaatcgcggatgaatctctaaggattcccggactttgaataacttgtaaaagtntattgtgtgccggcgcttcaaagtccttggagttggcgatgaatggtcggtaatcacccaaatcaatgaccacgtgcatcatggagccaagatcggcgaatcgtaaccatggaaatagtcgcatggcttgtgtctctctgtggcgatgcaaccgaacgtaccacattggtatggccgcgacttttttcatcgttaancgtgcatcataccagcgtcgaagtgtctcgc

SEQ ID NO: 75462 - DNA, 382 bp, Oryza sativa
  unsure (1)..(382): unsure at all n locations
atcccattaaggacttgttaccatagtttttcttttctaaaaaaattggcgattgattagatacgaccgtgtgatgtatttgggatccgatgctatcttgtgaggtgcatgtgcttctgggttggatccaattcatagagtagttttagattttgatttttgtggcaagttttgtgagaagtgagctctggatattcctgaccagtgaccacatgtagtttttgatgctagacatctttgtgattcctgttacattngctatttagtctgtacaaattggtagtcatttgtgtttcaagacagcggttgaagtttgaacaatgcttcaatttgttttaacattacagattccgtacttagtgatgtacatcatgtgtcaatc

SEQ ID NO: 75463 - DNA, 472 bp, Oryza sativa
ttacgttctcaggatcagtgcttacatctctatgacactctaatcttgtgtatgtgaagcggcgagctatcatatatgctatataatctagatcgaaatcactatctaacctcagcggatagcctctatcatcgaaaacagtcggtatagatattgacgccgagatagattatacagtatatttactatcttgaaaaaggtgtcattaacttgtttagatcttatgtttctcttcatgcctaatgctgcatcgatcaagtttgatctgttaagtaatgctctgaactataatagctagctggtcttatgaatgctaatagagatagcatcggagttttcgccgatcttacctggattaaggatctcgtcattatatgattacttgatatactaaatctgctcttaatactaagacctcacttagataaaatatattaaggctactatcagccggttaagtcatcctgaaata

SEQ ID NO: 75464 - DNA, 459 bp, Oryza sativa
  unsure (1)..(459): unsure at all n locations
agcttcagacatctataattccaaacctctaatatgggtgacattcctggctaccttaccataatttagaactaagaatgaggttatgcccaggtggtacagttctcaacatgaggcttgtgaactgctgcatgtgttagtgacattctgctaccaaaaacgattagttctcttaacaaaataaaagaaaaaaaagggtaccatggttgcttaggttggattcttttaatatactgagacaaatgagtgttatttctttcattacacaacttacctggacatgcgcaggagacattagatcttcattagcaggtggcactacatcttcctcagatggtggntccactcctgtctttncataaagaaactaaaatgtgacagggattagacanggctagatgcagaatacatattattgacagtatattagagggtaccctgatcagcgtcattgaatca

SEQ ID NO: 75465 - DNA, 498 bp, Oryza sativa
  unsure (1)..(498): unsure at all n locations
tagcaggtgtgttatgtgaaatgcacaacagaaaataattgttgctgtgttctcagaatgaaacctctgaacctatttgccatgcctgaaggggaagacngtgataataatgtngaccatgctgatgttgactcacttgtcgtatgagtggatcagatgaatgtacaataccgacctgacgatttcacaaactggagaagatctgacattaaaggcattagtggtgatgctactgtaattgaggaggcgcgtgctgcatccatgcctgaacctgatgacgatgacatacctgacgaagaagacgaatccgatgacacctacattgctgatggagttgttgctccagtcgaatcccatggaggagacgacgacgatgatttttntgtgtaatgttgggttggattctcgcattgcacgatataatatacaataattaatggatatatgtttaattacaacattacatttcgaatctaactatgcactgttcagcaaatt

SEQ ID NO: 75466 - DNA, 383 bp, Oryza sativa
  unsure (1)..(383): unsure at all n locations
tgcaagctggctaacatacgccattagctcctgatatttattgggggtctgattgcaaagtatctttcttgccctgcttggctcatcttcatttatgcttcacagatggcaaatcaggtgctatagcanggcgaggtcacagctttgcagttgccctccaattcatcagctgacgttgatccattcacaccacaccacacaatactncagcagccgaagcagcactgacgattctagtacaacggagtttaagcaatctcatggaagtggaatgtggntatgccttctgactgtcaaccctggtgctaatccgcagtatgctgcccccttcttgtacagcttcatttgacttaagaagatcgtagcaccgttacttgatttac

SEQ ID NO: 75467 - DNA, 494 bp, Oryza sativa
aaactcagcttggcatcagatccgtcaaaatagaagtgtaactcttgctcatattatcgagccttcacgatctctctcactttcactggatcgtcgaggaaacgcaagcacttctccttgaggccatcgcaatggtgctcccgggcgaatgcaagcatggaaacaaccgttctcccgttcacgtactcgcacagtttgtgctcgcacaccagcctcagcctctccatcttgtacctgctcgccgccgcgaccaggtccgggagcatcgccgccgcgtaccctcctcctttcgtcgtctctggctccggcagcgagtcggtgtacatgtagcggagcagagcctctaagtcccgcgcctccatgtccgcgatgcgtatggcggtgtgatccaccgcgccgacggtcgtggcacccaacttctttgcttggccccaaaagctctgcacggaacaccggagaccgggccgcgagcaccagcctgtgtgccgcgaacg

SEQ ID NO: 75468 - DNA, 446 bp, Oryza sativa
  unsure (1)..(446): unsure at all n locations
gaagaaccggctcgcctgcnggatactcgctgtatctgtcttgccaaagctcagtgctgactcgcgacatgcgttctccggcgtataccgccggagatcgggacgctcccgtcgttggagatatcgcttaacctcagctgcaaccggctctcctgcgagataccgacgcatttcgccggacttgaaaagctaggcagcctcgacctgtcgcacaacgagctctttggtggtctcgactcgctggcggcgctgcagaatctcgtcactctgaacatcttctacaatgccttctactgcgagctgccggacacccccgtctgtcagaggcttatccttcacgtccttgtcgggaaccgccatctcattcgtcgggacggctccgactagtcttccggtgcgggtcttttgtcctgaagtggcattccatctcccgcggcacgcgggct

SEQ ID NO: 75469 - DNA, 404 bp, Oryza sativa
  unsure (1)..(404): unsure at all n locations
cagcttgggtgcttaccggcgacgcctaggctatcacgagagcttaggccccacgagttacaaacacaatcgaagattngcttgctatgaactcgagtgctcaaagtatgaagtgaaactcacaagctctcaacttctcaatctctcaatcgaactctcttcccttcacaaattcctctcacaaagaggcaccacaaaggatggagtgaagctcactagctctcaactcctcactctctcaatccaactctctttccttctcaaatccccctcacaaagcggcaccacataggatgggaaatggagatggctcattggctttggatgtgtctaatgctgcccaagaatagccaccactcacaggagagatggagggagttacatacccaagcccctaaaaaact

SEQ ID NO: 75470 - DNA, 394 bp, Oryza sativa
  unsure (1)..(394): unsure at all n locations
gttttttaaaaaaactgtaccttgttatgaagagagattattcgaaatngcagacgcatatggctgcgcatcattgttatgaagagaaagattgtaatgttcaaacgtcattctcgttggccccgggaaataatgacgacggttgagacaaattagatgtcaaactgatcaatgcaacttgtggcaaatttgtatgattttgagctctcgaggttcagtttactggcaatctggctcaatcgagatcttttgaattgatagatgaagctgagattggtcacatatctaaatacgacaagaaaacaagattatggtcaatcacagccacaacatttcaccttaaacaggagtactacaataccttgcaaagagttcctaaaactctagtaatatt

SEQ ID NO: 75471 - DNA, 480 bp, Oryza sativa
  unsure (1)..(480): unsure at all n locations
agctgtttcgatcactagacgtacggacgtgctttaagaggtgacatgttntttgatatttggctatatgcatatgtgactatggagataagttggaccgactggaacgtcggattctttgagagggtgtcttagacatcctagtgcaattaggatgtggtctatattnttttattaaaagaatttgacatgagttggctataagcattgtgtgcacatgagtagtgagactatcttgctatntaagcaagagtgtagccaacctgtaatgcattggccctccaaccatattatgtttggtttgactatcttatgcgaagcgagaataaaagtgtaagtgaggagatatttataagtaagcgtgccacatggatggaggctgggctgccttcttctgaaggacggggtgttacaaattgtaaactanaaatacttgcatcatgtcgtcttaaacttatgagaataatatgtcacaataat

SEQ ID NO: 75472 - DNA, 339 bp, Oryza sativa
tattatcaaatcacgagaggcatcacggctgttattctctataagatatatctcgatgcatccatgatgagctcttggcatgtagagcctctcctgctgattctcgttaaaaaatgatgagctttcggttctaacaatctatgatacatatacacaaaggaagtgtaattcatccatgcattgaatgttcctggcttggagcactatgcgttcgaacatggagatgtacttatcatcttcaactatattataaaatccattccatcttaactgtagcttataatgacttaaatattttgaaaaattatgacatattgagctaaacatttgttgacttat

SEQ ID NO: 75473 - DNA, 99 bp, Oryza sativa
gcttccggcacgggattatggttccggcctcttcggctttttctgctgtgacggaagggcggtgatacggtctccgcggtggtggccgaggggggggat

SEQ ID NO: 75474 - DNA, 384 bp, Oryza sativa
  unsure (1)..(384): unsure at all n locations
gcttgttcaataaagctcttctataacaaagtgcttggaagatgaggatgcactaatggaccaaatccatcagaatnattgaactgttaccaaagcagccaaagtacttgaggaaatgaagatatacgagcagaagctgaaaaagcttgccagagacacttctaatgctcgtggaacatctaaagagaggaagctcctccttgagcagtatgcttggctggctaatcttatggagaaggcaaggatgataactgcatggccaaaagtaagtgaggggtaactaactatgtgatctctagccacaaatattaactctaaagatggatctattgtctgtttatgatcttcatttattactggttttggtagaagaagaacctgatt

SEQ ID NO: 75475 - DNA, 455 bp, Oryza sativa
  unsure (1)..(455): unsure at all n locations
gctgaagtgactgctactagcctacgatctttgaatgatttcttggagtgactgcaacgagcctacgatcaaccccctcagtatgaatctacgacctacaggtcttgccttgtcaaagatcaaagcccaaaatgtatggacactagctgacttcttgatgttgggcataattgagaaattccaggttctcaatgatgattagtcttatttttctcctaaagaagatagctaggttatcttaatgttaagcagcatgaccatggattatctccagtattcacaacgttcttgatttatatatcaacgtaagtaaacgcaaattttgcataaactgatcatactacatatgcaccctgccgaagctcaagttacatcaagccacgtcgacaatactacagttagtcaatgcataattntatggaaatatcgaaatcgagaccgagttaaaagatact

SEQ ID NO: 75476 - DNA, 378 bp, Oryza sativa
ctgagagatgggaggttatgcttctgcctggttgaccgccaaagatcacagctcgaatgattcgtgtgtccttaaccatcttcgcgcaatggatgagcaagatgactcctcaagccatcacaatgtgatctccggtgcctatccccaacctaggccaaattagcagagcatgatagatatctaagatgacaatgatgacgattatgatcaggtgggtgttggtcatgtccctcccaacattgaaaatggacattttggcctcaacaattatattgtgcaacagatggcaacataaggccttgaaaatgatctaacgcttgcatcttttcttgcctgcacacgagcaattaaagcttgcatgatgacaacttcttggat

SEQ ID NO: 75477 - DNA, 262 bp, Oryza sativa
  unsure (1)..(262): unsure at all n locations
acctgangctgcagcttgttacagataattaaaccaaccacatccaattggtatatgtcatagcacccaaattaaaacatggatggctttatttggccaaactaactggatctactcatcccacatattaaagatattaagggaatattttctttttgggttgacccatacaccctgctctttatccaaacaaaaccaaacaaaaatcagacggtctatcttccatccaacatcattcaccaaaacaaacacactctaacat

SEQ ID NO: 75478 - DNA, 468 bp, Oryza sativa
aactcaagctgtattccaaagttacttctgcttgagtctagctctgtcctaattattacagtgaagtactgcatatatatgcttgttgaatagctcgtaatttctagtcttgttaacttaacatgcttcattttctaggtgctggagaagataaacaacccgcattatctctaccgcatgaccatcctgcaagctatttcattgctggcccctgtcatgggtgccgaaatcacttgtcaacagctgctccctgttgtgattaattcctcacaggacaggtgaaaaatttgaatttgaaatgttagttacccatctgatcaggcctattaacaaaattttttaaattcagatgccaacatacatcaatgtgcaaagtctgcagccttatccgaccttgacatctggagtgcagatttgtttccttgatgcttcttcgaatgcatacgcatttacggttttggggtatat

SEQ ID NO: 75479 - DNA, 467 bp, Oryza sativa
  unsure (1)..(467): unsure at all n locations
gaaacatgaagagaacaagaatcgggaagaaatctttggtgattatgtcttcctacccacttggtgctggaattctgttccaacagtttcttatacaacttcaaacattcatattaagattacttaacaacaaacaaaatattaaaaaaaatctggtaaactaccctgtcgtcagaaaactactcattgtgatttctaagccaaaggtttaggtgagtacttcagcaacttcagtttgacaaatcagtcgtgtaagcttaaaaacatgcatatcaaggaggtcaagtaactacagccatattcttttgattntatttaccggattattgaaacagattatttggttcatgcttcacaaaatatgttntctttaaaaaaaagtccttggactgcattgcctagatcgcttaatttaagctttttggtaagtttgtttttaaaatattcatttacactacatagagata

SEQ ID NO: 75480 - DNA, 472 bp, Oryza sativa
  unsure (1)..(472): unsure at all n locations
cgtctggtgttttaggttgacttggagcacaatcaatataggtcatntcagggttggacctgcttgatgcagatttcaacaagaacagaggagtttgttgtagacacccttaaacttcgcatatacattggtctctacttgaaagaacattttaaagatccaaccaagagaaaggtttcttctgcgttctccaattgtttatcattttattgaggggaaattgtttatcattgtgaactcaaatttctgtttacttgggttcttcttgtgcaaaaaggttatgcatggggctgatcgtgatattatgtggctccaacagggattccacatatatgtntgcaattcttttgacacaggacagggatnttgattaataggctaataatactaaatactaaaactgtgattcttgatagcccttaagttacctccttcttattctcctgcaaatcccatttcatgtctataactg

SEQ ID NO: 75481 - DNA, 401 bp, Oryza sativa
  unsure (1)..(401): unsure at all n locations
agcttaaaatgctgccatttctcatatgagttatttaattcgtcattcataacccaagccaattgaaatacaaaattgttcaaatagtttagaacttccgacaacaaacattttcatacataactactttaacattactgaaaactcatatatttgcttctttcgtttaattcatttccattgttgggtctgactgaggtgataaagcttaattcgttgacaaatttacttcttgtacataaaactgaatagtccttagaaccaattgtatctgtgacttcaatggttgaaggagagagaaattgattggctgttctgcatattctttgtgaaaatcaaataaggctgaacttgntgacaatctttcttcttgtgtgtaaagctgaacaatcctcacaatc

SEQ ID NO: 75482 - DNA, 484 bp, Oryza sativa
cggacactataaaactaagcttggatattccaggcgaggcgaccgaatggaggaggggatatgaaaggaaagggaagacgaagcacctatcccatcggcaccgcacgcgcgtacctactgacatgtggggtcactacaatgtgggccacacatgtcagtatgtatcgagggaggtgggcggtggaaccgccgtgtgattcttatctcatcttggggctcgtctggtcaacgatgaccacgacccgatacgatacgccctaggttggttgtgggctcgttacaaccaatgggccgattattacacgacagataggtccactccaacaagagaattattgtatatcttgatgagtgactatagtctctcatcttacatctaggttgaatcatatttgaattacagtcacagaagatttgagcgtctaattgctaaactaggtgaaatatttagatcctccacactatacaattttcggacattcat

SEQ ID NO: 75483 - DNA, 460 bp, Oryza sativa
  unsure (1)..(460): unsure at all n locations
agcttagcatctttngccacctacatctgatttgctaattgcaactcttctagttctagcttatcatcacccaaattaattaacccttgattaaaagccaaagctattaattatattccaactccaagtaaattcaattcctccccatctagctaggcagctagcctttaaaaccatgcacaccttcaagatacccaagcaaggagatacccttgtcatccaatggaatggatgattcccttttggctccttttgttttgagataacagtacggcttataatatattctcctgtgctaattaaattagggttcatgctgagctagtactactcactagtactgatgtgagaggagaatgttgggtgacatgtataaagtcttctctgtgttgaactggacacgtntccagttntaaaaggctgttagatggctaggaaataaacaagagatggacacatg

SEQ ID NO: 75484 - DNA, 365 bp, Oryza sativa
  unsure (1)..(365): unsure at all n locations
gctgatctagaatctctgaagcagaagcatattatacctttcttaacattgggaatatgagaagtcctcgatgactcgcattagatcgatcaaggaagaggcaggctcatggtgtgtccttttaattgttatttgttgtgccatggcacgtaatatagtctctaactcatattatcttatctttgttgtagactgacagagttaacctggagaccgaagctgctgagagagagtatgattngaaccgtgcagctgagctcaagtacggaacacttctgtcgctacaaaaacagcttgaagaggctgagaacaaactcatggaattccagccgtcaagcaagtcaatgcttctagaagaagtgact

SEQ ID NO: 75485 - DNA, 497 bp, Oryza sativa
  unsure (1)..(497): unsure at all n locations
ngtgaccttaacctngccggtatacaccataaagtgtgcttcaagcgccgacgggcataggcattaaaaggtttaaggcgtctgtgggtacaacaacacacctctgcagagtgtatgaattgtgatatgtcactccctgtttcgggtagaaactgcgaccgcggcaggaaatgaacctattggaggttctaatacctgtggtgccttatacgcggtagattttataattacttaatatgagcttttactacactcttttttgaacatgcataaaattccttgttggattatgggatntggagatatatgtattatgcaggtggattatgggcatatatttgttggattgctatagttggacttgttgagtaccattcgtactcatccnctatatatatnattccttgtagtgttgagctaacaattataacaattacgtgaagagaagattctacacaattgatcaagtgttgcatatttctacatcaacttattgt

SEQ ID NO: 75486 - DNA, 335 bp, Oryza sativa
ctgatacttggttacagccatgaggtgcaactcactgctccacccgctgttcgtgtcttctgcttcaaacccaacttaatttgctgtactggtatcgacaagaatcgggtgcacaactttgcgggcgctgctcggaactgtaagcctccataggtatacaaagggaaaggcatattgtacattgatgaagctatcaagctgaagccagggaagaagcaaaagaatgaatgtagggatgagccttcatattttactctcagtctgctaagatgctgtagcacatttttagtggcgcatatgttcttgtgggtgtctggtctggaccgctgaacatc

SEQ ID NO: 75487 - DNA, 387 bp, Oryza sativa
  unsure (1)..(387): unsure at all n locations
tcaaggggttcgacccacaatgacttcacatgtattaatgttctaaaaatctgtataaacttgcttcgctatataataattcattcctacaaaattcaactaaatttaacaagttttcatagtgtgaacgcgagttaaaaatttaggtccgagttttacatgtaactagaattattgggtcttagcaacacatcgtgggccccacatgtataaagggctcaaaatttacacaagttgcttctctgtgcaataaattatcccaccaaaattcaactgaattcgataagtctttatagtgtgaacgcgagtttataaaatttgggtctgagttttacacacatataactagaatnnttgggtcctataatgtatcgtggaccccacttg

SEQ ID NO: 75488 - DNA, 322 bp, Oryza sativa
  unsure (1)..(322): unsure at all n locations
tattaggcaagaaacacgaactcatcatgccaatctaataatcaatgttctgcaagagatgcactgaagaaacaaaaagttcaggactcgatcaggagacgccgaaaagaaggtcattcttgttcacttgcatcatgtcttcgtgaatcatgagctgataagtggtgccacactagctagtaagtacattccaggctcgcgtcactttcacctgaaccgcctaattttcaccgcaaagttactaattttcacaagctaattacgactgaccaacaatgttntcacaagcctatatttcagtctttttttcacattctgcagc

SEQ ID NO: 75489 - DNA, 438 bp, Oryza sativa
  unsure (1)..(438): unsure at all n locations
ctattacggaccttagaaactcagcttagaatttcatgtgaactgatgaagtgatgaagcgatgattacataagtgatctgcataacagagctgcaggagttggtggagatgctgaagctgaaagctagctgcaggtcaacattgtgaatcaacgtcaacaaaagaaggccataacaatggcatccccaggagtagttggattgttgaaagcattgaaattatatggcaaaatngcactngtggctgttgcacataatatattatattatacaataataatactactaatgatctcatttatggacctactctcacaaaacaagttatattgaaattcanttttttagagggagggagtatgtttttttttaagacagagggagtacttatgtaagaagaanggtggtcagtgtcagacttgcactaatgacactaca

SEQ ID NO: 75490 - DNA, 418 bp, Oryza sativa
  unsure (1)..(418): unsure at all n locations
tgcagctaattttgaatagaatgacgacttttattcgttcatgacatacatatttgctcttcaccaactggaatgcgacgaataataaacgcgcgcaataagtaatctaacgcgacgttttaatgccgcgctgtgtagagatagcatgggtcacataatgatgtaacggcactatttgagaatataatagctggggcttggtatnttaggccctatccttttcttggcactacatgggaacatctttcacacattaagatacatgagctcattggccaaagtgacttggatttgtttggcatgcctacatatagggaccccaccatgggctgtgaaacttatgacaggagagaatcttaaaatctcttctctctcttcaagtccctggctctcactagatatcattcatacataaatg

SEQ ID NO: 75491 - DNA, 264 bp, Oryza sativa
tcgacgctgctccccgccgccggcagatacgccgacggcgcttcgccgtcttcgctgctccctgccgacggatccggcaccgccgccgccgatttcctgtcgtcggttccggcgagcccgcgcctggatccggcaagctcgccgtcgccaagcttgtgtccacgccatcgtgggtggaggaggacggcaacgtcgaggaatcaccgccgcgctgtggccaccgccgctagatccggtgagcccacgctcggatccggcgagcgc

SEQ ID NO: 75492 - DNA, 392 bp, Oryza sativa
  unsure (1)..(392): unsure at all n locations
acacgccttctttcacgacgagagctgtcatatgtgaacccattcactgtcaagcggntgtctatgaggagtgcttctctatgttgcttntctagcaacctctccttcttctacaagaggaggcaaacattgggatataattacattctattatattctacgaccagcagatttaactctctgagacctacgggtagataccctgtgaatcttttccatctctggaagataattggtcttcaacttcttgtcaagcgagacctcaagcctgtgcctacttgagaagagttttccctcctaagataggcggaaagaactactttcacttaatttcataagtcgatcgtcaagtaccatttcacaattgtttggtaatggtcttataactattt

SEQ ID NO: 75493 - DNA, 393 bp, Oryza sativa
ttgcattttatgtatctgcatttccctgataatattagtcataactcataaatgaactcgggcaatcttattttctccgtttgatccaccgcgctatcaaaagagtactggccatatttctgacaccataaagaatattgctcattgagactgagattctggttcatatgtatccaaatatttaagtatcgatggttcacatacatgatataacattctgaaactgtacaagcacccccatgtgcatatttaatttctatagttgaccatcccatgtgcatgcctggagcgatgctacatgttatcactatcatattatccactgttcgtactgctatttgcttgcttgagacgacccgctgatggagacactttggtatactagcattttgt

SEQ ID NO: 75494 - DNA, 409 bp, Oryza sativa
  unsure (1)..(409): unsure at all n locations
nttctggtgttcaaaagggcaaaatatggtggctttcctgtctttagcatagcacctagagccaggaagaaaaagcacgagatcctgaagaagaaaccagtcaaccaactcgtgcacattacatttccatgccaatgcttctgctttagtgacgcaagagcttaccatgccgtcgacctagttgacgtcgccgtggagcccacacaccttatcaattggagtatatattactgccttgattagctcagctgtcagctcgacttacatttcatcaccgacaagcagaagtgatctgatcaggagcacaaaaaatatcatctgacactcgatcgaattattacctttctttgacagcattgcattctcatcactcagggatatgttatgccttgcaatgccacttgacatg

SEQ ID NO: 75495 - DNA, 489 bp, Oryza sativa
  unsure (1)..(489): unsure at all n locations
aagcngcatttgaaaatataaactatgctcatctgtgttctgtttaaatngaattaggagcaagttaactatagcatgtagatgcaaagtctgacatacaaaggggaaactaatttgacttaagcaaattattactaccggccttaccacattgatcaatatattggccgatatgctccattgttgttctagcattctcacctgtgaattttgtgaagttgggcactctaaatccttgcgggtgtgggacctaatctacgtgttcaagatacagtctttgatatgtatacataactactttggaatcatttctatacaattccgcaagaatttgtattaatctttccaacaaccatatgaccgatttgtgatnttgtctttagtgatgatgctctttcactttcgcttgtgatacaatccaaccggcattgattcggtattactcaatgggatattggcctaatattacaacattctaccactgttgtt

SEQ ID NO: 75496 - DNA, 424 bp, Oryza sativa
  unsure (1)..(424): unsure at all n locations
agcttctgttaattaattntgaggaagccacccatgctcgatggcagttcgattgtacaaactgatagggaggggatgagtggacacaggccaccaacaatcgtgcggaagcccttacggcaccttggcatactcacagaggtggcgcacacaccaacagtggcagcaagctgctggagttggagatggtggacaagggtggtccaaagtgaaaaaaatggtaatgttatatggcctaaagtgaaatctttgtattatgggtgggttaagctgaaactctggtaaatatatatggcccaatatgcaattcactctatatctcgtgggtgcgagtactgatattagggggtggtttngctgaaactctggtaaattatatgggcaatatgcaattactctatatctcgtggtgcgagactgacat

SEQ ID NO: 75497 - DNA, 187 bp, Oryza sativa
atccacatttagtagaaagatgacatgttctatcttgttccggaagacaaatgaactgacatagaatgggtggaatccatttccacaacactatatcaacgcatttgatagcccatgcggtgtcaaatatgtcattggatccacaactttcaagtagctcttatgatgcaagggcttgacccaagca

SEQ ID NO: 75498 - DNA, 468 bp, Oryza sativa
  unsure (1)..(468): unsure at all n locations
catgcaagcttgtccctcttcccccatcatatcatttgaggaactacacttcaagggaaacacgaggtggtgtngatagaactgatgtgaagcctctagttatcaatcaacctcaaggcccaagtttccatgtcaatggttaccttgtggaatggcagaagggtaactggctatctatagtgtttactgttttaatttaattattggcgtagtagtatctaataaaaatgattaaaaaaacattttctgttgaacagtggaactttcgtattggcttcacccctaaagaaggtttagttcttcattctgttgcatatgttgatggaaaccgtggccgtcgacctatcgctcacaggctgagttntgttgagatggttgntccttatggcgatccaaatgaaccacattatcggaagaatgcatttgatgctggagaagatgggcttggaaagaacgcaaactctctta

SEQ ID NO: 75499 - DNA, 305 bp, Oryza sativa
actaagctttcggttctggtcttgcccatgcatccatgctacttttagaagaactagctctaagcggatgcgctcctccacaagcttaaggatgtgcaaagcttcacccgctgcatggtcgctcaaagtccgttcatatctaggctgggagagaaagcgctacccctatttaagctgctcatacacttctggccgatttactggaccgaggatgcatagcgggcctttactcatgtgaaggcgtaccttacattctctccagacctagttgccccgtagccagactagccgttgctactctacct

SEQ ID NO: 75500 - DNA, 483 bp, Oryza sativa
  unsure (1)..(483): unsure at all n locations
agcttaggacttcgttctatgcatatatgcactaccgagagaccgctccctactggtctgccagtgtggttatgacattttaccaattcttgcgtcgtacccgaacatggagtattacaaaggacggacatggttgtcaccatgtgctgcctaagctctataacccgtggggtatacccgcatccaacaacatttaatcaacccaagaaccatgtttgcgttgctaaataatgcatatagctcccccgaaaatcccaccctacagatggaaaagtaagaactagctcacccattaaaatcactaaaacgatgccatggcatagatcgactagcctaaacatatatagcatatgaaataagtataaaaacatcaaggaaacatataattgacacagtagtatatgaaccacgaacaccgatatataaagaagtcttacaaagagaaaagagcactagagccatactcgaatctncaagaggact

SEQ ID NO: 75501 - DNA, 369 bp, Oryza sativa
  unsure (1)..(369): unsure at all n locations
tatgcataaccttcccatgagagacgtntgttnttgccaattatgcttatgttaactagntaagcataggtttttgaatgactcgagcaaataaaatttngctagaacttctatgatgagatgcttggtatgtcgtctcatgttcagcaatgaaccctcactaaaaattctaaatgccggaataaaataaaaaacgtcttggcctaacatgggtaggatggggcaggatgggtatctaggattttgtttgctttcttgagctctcaacagtactcacccctgaaccatattagctcatgttcaacttagactcatgtggaaaaattttgataatatttggcactaaaacatggtcagtaaataatttac

SEQ ID NO: 75502 - DNA, 454 bp, Oryza sativa
  unsure (1)..(454): unsure at all n locations
agctntgcattagtctcagcttgcttccttgtcatatactgttgntccgccacccttgcttgctcagattcttgtagcttcttcgccaactcttgcacttgtgatgtgaggtcattctttgccaacttctctgcagctagttgctctttaagtgtgcctttctttctgctctgaatccccacagtctgcagaaatgtgggtttcttggtcttctcagcaagaacaccagcaactacctcggtcatggaaggggcctcttcatcttctgcatgttcagacaagcttgtttccatttcatcctagtagtgcaagaaaaaatacatggttcatgagacgcagcaacaaaaaataaggttgggctttatttgtgaaaagtaacttacaataaccagctggacatctggtgtgtagcctttcttttactgtagggcactccttgacatatcactgcatc

SEQ ID NO: 75503 - DNA, 451 bp, Oryza sativa
  unsure (1)..(451): unsure at all n locations
agcttggacattatcctanggatggatgggttggcttagcacaaaggacagatagattgtgccaaaaagtccatcaccttgcaaggacctagaggaaagcaagtccgctttacctctaacacccctaccacaagtcggtctatcctaacctgtttacaagtcaccaccttggagtcggtgcccatagtctgtgaatatcccgacgtattcccagaagaattaacgagtatgccaccagaccgagagattgagttcgccataaaactggcgccaggcaccgcaccaattgcaaaaagaccctaccgaatggcagctaatgagttagcagaagttaagagacaaatcgaagaattggagagtaaaggttatgtgcgacctagctcatcctcttggtgagccccagtgcttctggtaagaanaaggatggctctgagagaatggtaatcgacta

SEQ ID NO: 75504 - DNA, 292 bp, Oryza sativa
tgccaagtctcacatgtcagttggctcaagaccagtattagacacttctgtcacaatactgtagccttaagtgggggctacaaaaatacagaagtcccttctctcctctttttttccctctatcatgcgcttcactctctctctcgctctctttctctctctctttccctctcacgctcgagcggcgacttgcacgctctcctcttcttcttacactgtggcggggcggccgggcggagcatcattctaagcggcaatagcgtcaggagaagcggtggtccgagcagtgatg

SEQ ID NO: 75505 - DNA, 378 bp, Oryza sativa
cgacttcagcagcggggtgactccactccacatgctatccttgatggcagcgacgagaccaacttcaacaagacagctcccactaggaagatctccagctctggtgtgggggaaaagagagcaagactgagtactacccactgtactcagcaagtcataccggaagaggagatatgatgcacgatataaccaaaggagactagagattctttgcataaagcttgcattcaaaaacagtagttgaaagtagtaaaacagttgtagaaattaatcaatattaaccaatcaatgtccaacgctacaccaagttgcaacatgcccaaccaaccacctgaactaaaccagttcattaagctaaactatgggtgagactaatca

SEQ ID NO: 75506 - DNA, 171 bp, Oryza sativa
tgcacaaaattactacccaaactgaataacattacttattttacaaggcaatccaatgatgggtggacttactcgatggatcgacaatgtcactccatcatatcatggccagaagataacagagtcagaaacactagttgagtttcaacgattgaatgaccaccagaatgc

SEQ ID NO: 75507 - DNA, 358 bp, Oryza sativa
  unsure (1)..(358): unsure at all n locations
tgccggcgaacgacagcgcggcggcgcgaacggagagcactctctggtagcggacggcgcggcgaactcaccggtgaccaaagaaacagtggaggagcatcggacggtgacggcgacgaggttgaagcggcggagaccttcggcttgacgacggcgacggtgctccggcggtcttcagtgacggcgaaggggcggacgatgactgcgacgcgacggcgaccacgaaagcgacctccgcgagcgacggcggcgcacggctggagcggcggcaacgacggcggcgcgaggtcccacggcgctagggctctctcgacggcgagagacgaatgcgatggtggcgacnggtataggagacacc

SEQ ID NO: 75508 - DNA, 431 bp, Oryza sativa
agcttttagatttgtctgcacgttctggtatctatttaagaacaaggtgttatatgcattatgttaattatattaatatatgtgtaggtttatccttttttctgtagttatcactcagttaatagattattatcatttatgttagatatggattaccatttaaaagacatagctatagtatcttagtgatctttaacaatggttcaatatcagaaggaaaacaagtaaacatggaagtaggtaactagaagagagatagacataaaaataatttttttttgcggggcagacaaagattttttttttccaagaggttgacctcatgtgaaatcttttccaaaaaatttctactcaccctatcctagaataagttttttttagcttcttggtgttggtccaaataagtttattttctagtgataactatatca

SEQ ID NO: 75509 - DNA, 447 bp, Oryza sativa
agcttcctcaccgtgttcgcctggaggtccacggttacttgggtacctgcctagctaatatggtggttgaggcatccggaggcacagcagatcacgcctgtcaggaggcagcatacctgatgatggccagactacgggagcgccacaactttatcttccacgacacggcgtaccgatttcacccttgtcgagccagcggtgatgatgtcagtactttccgttcgacagccggcgagaacgacaccacctttggtcacatgtgtgctatgatgaggggattggataggatgcactcggacctgcacaaggcgtccaaggccttgaatgatgggaagctcatgaggatcgtcgctctgaaggacgagatagcgcgcctgaagaaggagaatgctcagttaaagggtcttcccgcgccaggaggagtccggatccgcactacgcccccgc

SEQ ID NO: 75510 - DNA, 438 bp, Oryza sativa
  unsure (1)..(438): unsure at all n locations
agcttctaaatcttgtaactagaggatagatgggtaactttngtttatatgatctgagattgcgtgctcgatgatcaacctgtgttattttggccttaaatgtttcttcatgtctgcaaattttgtggaaaccagtgtcatggcgttaatggagattggggaaggcctctccaatctttctaaaaaagaactctgaactaatgtacactntgatgatcgatgatctccctgactttgatcatcaacaaagctttgtttatcccaaactatttttgccatgtttgcgcatatgtttcatccggcgagttgggacgacttcattgagggtgacctcttcatgggaagttcttcgtgttcccaaatgtttgatctgataaactggccgggatgagtttatcgagtgccaaatcatctatatgtcattaccaagaagttggg

SEQ ID NO: 75511 - DNA, 446 bp, Oryza sativa
agcttctctctggaactctatctaaaataaaggtatgcagaactatccaaactaggccgctcaaaattaattcaggctggccactgattctatcaagaaactatcctcttcacttttgagccccctactaactggaatatatatatatataccctctgcaaaacgaactttttttagagaataaaacctgcaaaaaggagcctgggagaccgatccggagatctggaacttcattttagccttcacagttcacgcacattgctcttccaatttccgcaaaggaagcccagaggcggcaaaaggaactacgcagtgggccgtccctacaggtggatcatttccgtgaggatacacccgagaaacataaatacaggcacagcacagtaacgcagtagtaccagtactctctatatactggagtaggggtgaaatcgggtcggggttcg

SEQ ID NO: 75512 - DNA, 462 bp, Oryza sativa
  unsure (1)..(462): unsure at all n locations
catgcaagctcgtagatntagggttcaagtataagtatggtgtggaggagacgctggattgcagtgtggaatgcgcgaagaggttgggagaactctgatgtgatgatgtgtagcaaaaattcgtgaattgcttgaccttatacacatgggtataccgtgtgtgtgttcggtaagaaacgaatgaacgacaaattcgttcttgctcgaatattcgtaaacgcagatcgatccgagatgtgaggaaatgttgggttatagtcatcatcaacggatcacaacttttggactggtttgagatatagtcatctctgacaggtccgcacttgtaacagttgatatttttcttattactagtgatcaccgacgaggcatacattatgtaggttatcatccatcacgaataaaggattntattgtagtgatctttaatgcatatatctcgtgggaagcttatnnatattt

SEQ ID NO: 75513 - DNA, 409 bp, Oryza sativa
  unsure (1)..(409): unsure at all n locations
gatctgggaatatagaagttgtnggttatggtctgtttaagggttgggttatggggcgctgatagcctgatactgcttttgatgttgcctccctgtgtagagaacgggtcctgaactggttagctggaatccccatcctntttttacctgtattcagtagctagttgtccctgttgtttagttttcgtttcttttgtataagacacttgtatgttttggctttcttcaaagggccaggtaatgaaatttgcctattgtctaaaaaaaagcttggtagacattactaattatacttattctcatttgtttacatgggtgtgttatgcagtattcatgatccctggaccgactctacctaatcagttgccactcttattgcattctnttaagggttaattagatccatgcc

SEQ ID NO: 75514 - DNA, 371 bp, Oryza sativa
  unsure (1)..(371): unsure at all n locations
aatngatcattcagaacattattttctgcttgccgtcatcnnccccgagtggtgttctcgcctttacgggggggtggtcaccaccccgttgctgggcatcgttgtcttcaccgaccggctgcttcatctgccgccgactggtgtctctgcctataccggtggttggtcacaccaccattgttaggcatatacgtcttcaccaccggcttgccttcgccgccgacgactggtgtcttcgcctgcacggctggcctattatgccgccgntgttgggcgtctacgtcttcaccaacggcttgtctatgtcgctgacgacaagtgtctccgcctgcaccgctggcgtattatgccgtcgatgttgggcgtctacg

SEQ ID NO: 75515 - DNA, 378 bp, Oryza sativa
gagtcacctgaggcatgtcagcttgcattaaacacctaaggttccgtgactttctgagtactaaagtactcaccctggctctatataaatatatatagctcctccgtcgtgaagtgaagatgaagtgaagtgaagattagggtttcgtcctggttctcaaccgtcgtctgtggtgttgggtgttaaaccattggatccgctgctgctcgttgtgctggagtttactcctctgtgtcttcgggtgtattctcaggctgtcctgagctgcaacctaagttaaggtaaataagtcctctatttattttaaggatttgcaatgattcatatttgtcaccgtgggtaccagcactatgtcctgagactatttctgagatcgcg

SEQ ID NO: 75516 - DNA, 426 bp, Oryza sativa
agcttggttatggacatgaggctattttgccatgggaggttagaatcggctctagaagaacggaattactaaatggcaagtatttgaagaaatattacctaagtgtttgggttaatgcatgatcggctgatgttgccgatacatgatagccgatgaattttcatcgcctagagatggccgatattgttatatcgcccttagttttttttttccaattgtaatcggttatggtttaccgatgtgcaatggccggtattactatatcgccctaagttgcttgtataattttattaatgctgttgacattataaaattagggggggcacatatattcaaaaatcgcatgatgaaagtgaaaatttttgagccaaattagaagttgtattaatcggcacaaaggtagtgttaaaacagcggggtattaag

SEQ ID NO: 75517 - DNA, 341 bp, Oryza sativa
aaactttttgcttttcttaaccactgtttaaaatgggtattatgctacggtgtaattgcccttatcaataatatcacacatatccactcatattaataaacggacctcaatgctcctctgtcttttaaagattgtgtcatgtatcaatttaaattaccacgttgtaatattaatcaccacatgaaagactatgtcattaatattgagctggtgtaaggtgttacgcctatggtccttagcctaggcggccagggtaaggtcctcgcttaggttatgctacccaaaagaaagaaagtgagcgccacatcctttctgtcttgtcatgtatgcattatctactt

SEQ ID NO: 75518 - DNA, 446 bp, Oryza sativa
  unsure (1)..(446): unsure at all n locations
agcttgcttgccttngaacatcttatatatcctctcgatgaaagaatgactatatctgggcttggatatgactatgccatcaaagaggaacttgtccggaattctgtatcattgcattataacggtaatatgaagccttggcttgagttaggtataccggactacaggaagtactggaagaggtttcttacacgagatgaacgattcatggatgagtgcaatgtaagtccataatgcacttaaacctgngaaacaaaatatctgacggtagattgctacgtctgctgctgtattatatacctagaggggacgagcacttccattgaggaaaaatggngccaggaaagcagttattagccatcaattttgacagagtagatccagcaccatctgttcattgaattagtgagcttgatggatggtttttctacaagttagagaaaatt

SEQ ID NO: 75519 - DNA, 443 bp, Oryza sativa
ggaacgcctgatggagtaaaaaaaggaagatatattagaaaggtgaaagagagatgacgtgtgtcatgctgacatgtggggcccacgtgagacccatgctgactcagccgccacgtaagccaaaaccggggtcaaaaccaccgaaagacctcgggtgaccggctttgtatagttaagggaccccgcgtatctgattatgcggttcaaggatgtttttctatcccgatgacaagttgagggaccttctgtgcactttttccctctaccggacattagaggtatgggcttcttgcataggatccgataacaacgtgtccaacaccggtccgtctaaaataaacacgagtaacaggattatactaccctctcgatcatattatgtttaccaaacatgatgagtgaccgggtactacttctgtaccaaaatcaaccctagtaatatt

SEQ ID NO: 75520 - DNA, 484 bp, Oryza sativa
  unsure (1)..(484): unsure at all n locations
catgcaagcttgtgcagtagagcatctgcaagagccatgagagcaacaaaaggatcaacaaaatagggacagaattttctagaanaaaatgattgtttttcatgtatcaaaaaatagtccatcagaaaggtacagtaaagttttcctatgactaaccagcttaaacatactactctgagaatacagggtaccaacacaagtataagaacagtgaatcccagagaaaaataaaacataaacaagtaaaattcatcttaaaaagctaagctacccataatacttcataaacaaagcaagatactttatagatggatagaaaaatatgaatagcatgcaaaatgcagtgagtaacataaacatataaactagcactcctagcaatttactaacaaaaatatactacaattcaagggtttactagcaaatatatataatgtgattatgtatnataagaataagtaaaatggagcctataaatggaatt

SEQ ID NO: 75521 - DNA, 453 bp, Oryza sativa
  unsure (1)..(453): unsure at all n locations
acacatgatactaagcttatcatgtctgttcacaaagtagtcattgcactttatgaactttaatgatactatggccgncactggaagcttacgaacaccaactagcacgttattgaactgttcggccatgttggttgtcatgtaaccccaccggcggccatttctatcgtatgcacgagaccacttatctttatccaacaactcatcttcaagccattttcgaggaccttcgggaatacgctgccttagtgcctcaacatccctctcaaatatccacttctcgtcaatctgacatatccttaggagctcctttgtctgatgcttgtctgcaccggccttgtggaaattagcactgaagtgcctcatgcaccaccggtggtgaaccggtggcaatcctgtaacaggagtcgtcatggcattcattataccagcatgtcgatctgagataataca

SEQ ID NO: 75522 - DNA, 449 bp, Oryza sativa
  unsure (1)..(449): unsure at all n locations
agcttaaaccgaaaatgcttaatcttactaattatgtaattagataatcgaatagcagatgctaagcaagaatgcaactttgtgggagaccaggcctcccttcgcccctccctagtttcgccccgcatgctagctagctattttatcgactgctacaattttttctcatcaggtattaatatctgggtttggattgaaccttgttcataacggatattntatttgtaaccaaacgaaataaataataggtgacgtaatctattaatagtgtagttggcttacaatcttagctggctaaataaaacaagctatcaatatatcaaaactgctaaaatggttttactttagggctggcctgaatcggtagaattagattacatttaagggtctagtgganaaagtgcacccgagaatccctgaacttatccatcggggattaaaaaaaatat

SEQ ID NO: 75523 - DNA, 490 bp, Oryza sativa
  unsure (1)..(490): unsure at all n locations
acacatgaatactaagccttaatttaacttatatgaaagatggtaatatatgagagatatatattataattgtagaagaagatatttccatgtacaacanatgaatcatgcagcagttagcattggttgaagatgtgaagcaagacctatcttcgttatttctttctagatacacatactaatctctaagctctagaagtctttgtctagtgcattcttgaaaactattataatctcagtggttaacaattcagatgatagagcgcctaacagatggtaccttgctatttggtacaacaagatctcaaagaccacacccgtctggatagcaaatcgggcgactccaatctctgatccaaacttatcacagttgacagcatcagaagatggcatttggcattgttcgacccgccaggtctttatctggccacaatatactaatacgtcactccacagtgagtatcttgatcagcactagtgtagctctgct

SEQ ID NO: 75524 - DNA, 422 bp, Oryza sativa
  unsure (1)..(422): unsure at all n locations
agcttgtcttgncttcatctatcgtcagggcttgactgaccatgcgagtataacggagctgcctctttctggtcaatatcgntacctgccatggacaaaatgtaaaatactccaggaaaatccattatatatctatatgatacccacaaaaccttatttttgtggtggactcctaatcttattgtatactccctccgtactcataaaggaagtcgtttaggacagcgacacggtttccaaaacacaactttgacttcttgtttctataaaaatatttattgaaaaatgatatatgtatatttttatgaaagtattttttaaaacaaatctattcataataattttatattttcaaactcaacaacttgagagttattcatgatttatattctcaagggttgacttaaacattgttctaaacg

SEQ ID NO: 75525 - DNA, 104 bp, Oryza sativa
ctggctttaaataaactacctgtttacatttatcgcaaagagtgtccttaagggttttcaccacagtgggcaatcaatacaatgacccctctgattataccaaa

SEQ ID NO: 75526 - DNA, 410 bp, Oryza sativa
  unsure (1)..(410): unsure at all n locations
agcttgtatattgtgaataaagaanattccattgtattgggcatacgccatgcgcacactgctttaacagatgtgcttaagtccctagaagacacatggtttcaccatacctggaaatatatggcatatgtggtgtaaaatccgagtaaataaactcataaaggatttaccaaccgcctagaaaatgacaacaatatataatcagcctaagccataatattggtcaataaaaatgcacacttacgtggcgaaaagcaatgatattgtatccaatcaattgcttgataaacccaaacagcaccttgactatataaaaaagtcagcggngcagctatataaagctttactggttgacaccttttaagatgcattgtaccaactcctaaaaagttgagtaactgcggtataaa

SEQ ID NO: 75527 - DNA, 466 bp, Oryza sativa
  unsure (1)..(466): unsure at all n locations
actggcagttactcacgaactgcgtactcattcataantttaatgaaacggaaccttctttgcagcaccttgctttgcattgtgaaaagtgtaagaaattaaacaggaattcatgtngctctgtgtacaatcaattgtacatccagctactgcaaaaccggtttcctttcgagtgattaattactttcggtttgaagacaaactttattttcaatttactgtttgactcaaatccctcaatgcccaaccgagctacctactccccggcgaggcgagcatggtgtccgtggacttgatcaggtctcctatgaaaagatcatcggcggtagttaaaatggccggaaaatnttgtcacgcatgagacattcgacgcaatcgtgactatgcattggagtacatttgatccgttcagaccagttcatcttaccaagattgctaagatggagaagccatgtcaataatcact

SEQ ID NO: 75528 - DNA, 442 bp, Oryza sativa
  unsure (1)..(442): unsure at all n locations
agcttatggagtctactctcagatggttntggttccactgtaaaattcctaccgagcttccgggaatctgcaaaacaagccacatatgtcatccagtccgaactgattttggttttgggccttgtaattgtgtcgtgagcttagcccaagggggtgtgcgccctatggcaaccctaggacgtgcctaatcatttttattcaatagccgtcatcgtttagagtcgggttntgcttagattattctgtcaagaataatttcgccgctagatcggattgtgaaacaccaaattcaagtgattatttattcatatgcaatttgattgcaatctatcttgttcttacttgtgttctttgattcgcatgcagggattagccttctcggtgaggtcaaccgggtttcggcatggntgataaccagaggagacatgtttggtgcttgcgt

SEQ ID NO: 75529 - DNA, 444 bp, Oryza sativa
  unsure (1)..(444): unsure at all n locations
ngactgatcctgcatgcataatggatatattcaaatatggatatactttctctatggnttcagaaaactaaaatgtgtgcaacatacttaattctttgagggggaaccagagacacctataaaacaactctagatcaacctaaaaatcatgccaaacatgagaaatctgactaaatgaaaaccatgtccaaaacgagaaacctcaccttcagatgccatccagtgtacagaaccaccaaaatcttagtgcaaagatattgccttcagctctccaccttaaaaatataccaggtaatgcaaaaaagaaacttactctgattatagtacagattgtggagtaataaggactacaaaactctgcttactctgatataattctgcttaactagaactttgaaaggctttgatccatatagcactcagcgatattagatatgaacacat

SEQ ID NO: 75530 - DNA, 433 bp, Oryza sativa
agctggcgagcttgacgagccgagctcgaatatctcgtcgagcctagatttccctatgtcaaggtcttaaattgtcaatgcaacagctagtactactcctactcccaatgaaaagctgtatagaaacacagagcgtgcagggctgcaccgtgcaggcactagcctactagtactactttactctgcagcactagcctattagtacgtactagcatgcatgcagctcaatttaatagtactactagttggcatatcatgtatgaaaaagtactagtagtactcgacaagcatgcatgcagcctcctttcatctgtattggttatttgagggcacacgagttaggctcgagaaagctcgaggctcgagcgagccgagctcgagcccatttctaagcttgtagtttaaacaggctcgactcgagctcggctcgagt

SEQ ID NO: 75531 - DNA, 312 bp, Oryza sativa
gcttatctcttacgctctaggaatggatcagtcagaacatcaccactcggtcttctcgttcgccgccgactggtgttttcgcctgcacggttggcctattatgccgccggtgttgggcgtctacgtcttcaccgaccggcttgccttctccgccgccgactggtgtttccgcctgcacagctggcctttatgccgccgtttgtgggcgtccacgtcttcaccgaccgggttgccttctccgccgccgactggtgtttccgccagcacggctggactattatgccgccgttgttgggcgtttacgtctttacc

SEQ ID NO: 75532 - DNA, 441 bp, Oryza sativa
  unsure (1)..(441): unsure at all n locations
agcttgagaacaacatcttcagcatttcccattcctatgataagatcagactcctgagacttcaaaaccatcttaagatcttccaaagcaaaaagtagcagttccagcatcgtgtctgagtaacctgcaaaggataaaaaggctaatgtcaatgccaactgtcagtgtgattacttgggattcttgcactgcataatacagattacagtataactttgcacgctgttacttgtatatgaatgttaacatcagattctgatacccatttccacagcatgacttgataaaacacacccttgatctcgtccattccaatcaaaaccttcatgatctggcacataccagatagtggaggtgcangtctcctcaagaagttgggactgaaaagcagnntgtctctccatttactaacgtctattntaaggcaaactcatatgtttc

SEQ ID NO: 75533 - DNA, 496 bp, Oryza sativa
  unsure (1)..(496): unsure at all n locations
tcttgaatcccatntcctcatgagcgaggtctcgccagttgttattgatgacaaccatggtggtgttgtagaccctgatcctagtctggatgctgatggcaacagtgaagcatcaatggtgatgagctcagaaaaaaggaaaaaatctcgcaagtatgaccagaaagctctgcaaacaaaccttgacgactacgcagcaatagataaccataacatcagtttaatgtacctgcgtcgcaacctgttagaagaattgatcagtgaagttgacacatttgatgagaaaggtcttgggtcatttgtgagaataagaatatctggaacaggtcataggcaagacatctaccggctcgtgcaaattgttggttagataagacactntcaagctaatctggctgggtttatgctcatgatgctgactttcccatatctgtgtgcaggcacaggaatagcgccagacaatatatatgtggaaaaagcactgaataacactgga

SEQ ID NO: 75534 - DNA, 445 bp, Oryza sativa
  unsure (1)..(445): unsure at all n locations
agcttagagagaaataaaacanaatcccacatattataataattaaaattattattctaaaactctgtataaaccacttaagattatttgaagtcaagtccaatacttcgggagttaagtaaatgcatgtgttcccataaaatatgatgatatcgcgcatcgaatcgattcagtaggtggtaatacaaataaacaatccttcacctaaaacagacagatcatatataccctccaagctgaagctgtatataactacccagtttcgctatacgtatttgtcgcgttataacaatttgcgataatcaaatgcataatacgttattgttatttcccaacacatctggctggttccctgtttttctattagccacgagctgcgccccgtccacgccttgcataactgatagtcctgtagtagcctaaaatatactctctcctatttttg

SEQ ID NO: 75535 - DNA, 445 bp, Oryza sativa
  unsure (1)..(445): unsure at all n locations
gcttactntaattatgaacatatcttacttgtcacaataaattattaaattgttataattatccacgctctgtgtgttagagtggttcaggttaatcatattatgggtacagattatcccatcacataattttacaatgaataatcctaatttacagttgaactataattataaatatatgaggtcaagatttataactagtacttatctaatatacatgtttgtcatactctccctcctaatttaatttatgcaacacgcaaattaatactatacctgaccactataatgggatgtatagtatatggtgtagcaacaatatcttaatattggatcatatatttgagtaggtgatttttactggaagctatacaatacatgttagagatcattatgctaccggctatattccattttatttattggacactacttagggctacta

SEQ ID NO: 75536 - DNA, 423 bp, Oryza sativa
  unsure (1)..(423): unsure at all n locations
agcttcagagccctctctctcccttacacgatgcgagatctgctccccttctcccgattcaaccaaccaccacctcatctccgattccccctcttcttcttcttcttcttcctcttcttcttnggggggttagtttctgaatcgtctctactgctaacctccgactctgatgccgcttcctcttcccttctctcctaattcacattctattcggatttcctttttgagggtactctagtctcactagtggagtgattgattggttgattggtgttgttgttgttgggaacacaaattanggtttgggatttcttgactggacgacctcgtgcgatttcgggaggcaggagccatgaacggcaataagcagtccctgatatacagcttcgtggccaagggctccgtcgtgctggccgagcacac

SEQ ID NO: 75537 - DNA, 465 bp, Oryza sativa
gacacatgaaactaagctggctgcctgtgtgagtagtgagtacaaacagtagcttaaggatgcaaatattccgggttccagttctttccagttcgtgggctgcattttcaccgcagaaatgacatgcaaatctatagtatatttaaagccagtactgagtagtagtactatgtcaatatcaaatgttgctaataatgctaccactataaatcagaatcatactccagctgcactgacactgtgtatgccatgccagggttgtaccgggcatggaggagtggttcatactggacagcattgtgcagatagatatgaggagtagtatgagtatgcaagaggaatcttgagacctactcctacatgcagctcagctctctggatgtactcctacacagtgagaagcaagctgatcaatgtgtggacaaacagtgtgtaagtgcattgcaaatcaattgatgctgttgt

SEQ ID NO: 75538 - DNA, 455 bp, Oryza sativa
  unsure (1)..(455): unsure at all n locations
atccttagagtcacctgccgcatgcaagcttcgtgcgatgaagctggtaaaatcttatctgatgatagatttaagcgtattaaggagctaaaggtatgggagttttttccagctgtagttcatgctgtggagctttcttttgggaaagaaagtgaagttgtgtatatctgacattgttatgagtttcaagcaaaaaaagaagcaaaactggctctggcacaacatggactcggcaagggccatgacacaaaatcagtaacctttaaaatgccttcttctgatcagcttagtctgaaacgggttgacccatccaagcttgaggtgcattttctctcttcccctcccgcattgcactcgtgccagcgcgctcatgcacacacatncacactttgcttatatgaacatcttcctttatgtaggctcacataaagagaaagcttacgaaagaggagaga

SEQ ID NO: 75539 - DNA, 472 bp, Oryza sativa
  unsure (1)..(472): unsure at all n locations
tctcggtccgacaacctgtgcagccggcggcgcgccgtcgttttcgtcgccgncgcgcgcacagnctgtccaccatgcccgcccgccggtgcctccttgtccctccgcttcaacctccctcgccgacggccacgaccggggcctcgtcgggggactcgcgtcatgtccccttcgacggtgccctactcctacctccgccgccagggacctcccatcacagccgccggccgtctacggcgagatttccccggagacctaaggtccgcttcagtcgcctccgccgcgagctaaaaccgatggtgacttggtgagccagccagtttctcaatattcctcccttttaactgtcatactcacacatgttcgatgaactttcgactttgtatttctggatggagatgtgccgatgtatntgacttactgtccctggtaatgaaattcaaggaaccttcactcagacggcattatgtag

SEQ ID NO: 75540 - DNA, 415 bp, Oryza sativa
  unsure (1)..(415): unsure at all n locations
aatgaagctcaagacaggggggactacagaaccgaccatttcttcaaattaatttcacattgttaagctagggaaagaggaagagaaacaccgtacagagatgtaatatcttacagtattaacaagatgaagagcctttttcccttgaccaactgaaatctttcttatcccataatgatgctccttgtttggcttctttgacaccctatgaccacaatanatgaacaccttaatttggtacatggtgaatgtacaggtcaaaacgaacatcataatatcggcagctgtcgttagaataaagagggcgtgtactcagctgagctacttcaaaacctcaccgagaaagaaagggatacctgatctactacttgcatcacatgttttagcttttcgagtcattggggcaattttttaa

SEQ ID NO: 75541 - DNA, 445 bp, Oryza sativa
  unsure (1)..(445): unsure at all n locations
aatcctcagaaacatttccattgatggtaacacattgcaggagattgggaacatgaaggtgctcataaccagactgatgaaggcattcctcgacttacatagaacctccaacacagatgttgatttcttgctaccaaaggtcgccgggcaagcactagcaatgctagcaatggataatgtgcacaactgcttagttatgttgaaggaaccagagttcattactaaactcaaaaatatgatcctgatccaagatgaaaagtacatatatgtggcgccaagcctcgtacgtagtatgtgccagcatgcccaagctaagctcacagaattagacctaaaagaactatctcacaccttacgagaggtgagccctgctacttaatgctacagatgcaatatttgaggtggatagtgtggtatgctttnttgcataaattanntttatgta

SEQ ID NO: 75542 - DNA, 427 bp, Oryza sativa
agcttgccgccatggtcatcttcccctaccctgatccatcttggttttgcccactagacgccgccgctgccgtccgttgctccgaccaccaagtcgcgtttgccacctccccttccgctccggccgccgtcgctcaccagtaaggaccccactttgtttttctctctcgtcgttcaatgccgctcgtgaacgtgcgccgccgctcatcgttgttgcgccttgcaccgtcgccgtgtgccgccgcttagccgcactgccaccgtgctcgccatggctggccgagccgatctcgagcccgacaacgctagtgcgccgtccaatcggcccttatggcagatctgggccgtcggttttgtggaccggcggtggaccacccacgtggtccaagtccatggtacgccggcaccccgtgccgctgacatgtggg

SEQ ID NO: 75543 - DNA, 457 bp, Oryza sativa
  unsure (1)..(457): unsure at all n locations
tcatcataggttgtagctcattgtccaagaatgggaccttgctggtggctnggagacagagctaggccttggtggttgcttngagatcgatgctgcactggaggtagctnggagaggaaaatggctaatcgagatgtggctctntggagctcctcaatggagacataggatcgattagatccaaacttaaacaaataggtgtctccgctcctctcttttacctaacatttaccgctttctatcttgtgcttatagtgatctttgcttgcttgtttacctctgtatatcactagcctgctcttgtagaaagtgtacttgagtagattctatagattgcatcttggtatgtttgctcaagtttagtttcttgggatggccgaacaatctcaccaaagtcggactatcccaggaacctctatgttttcctgtcatctgcactgatcagactgtccgacag

SEQ ID NO: 75544 - DNA, 434 bp, Oryza sativa
  unsure (1)..(434): unsure at all n locations
tgcaagctctctcgagcctcgatcttgagctccacctctagctctatcaagctctttctcccccttaggcgagctncgcctccacctgcgtcgagcaactacaccgtactgtcatcatgttgggctttagctcaagctcggatgctgtctcatcccaagatcaatctcctccttctgttgccttgtccgggtgaggccgactatgagaggttgaggtggtgctaataacgacatgccaacgtcaaagacatactatggagctcaaaattctcatcagcatatgcgatctggcttgggaggaggggttgagagaaagagaaagggagaatgaataaggaacgtggctatctaataaatggccctagcaaaattttaatttatttttgttgactagatgcaacaaaagcaacatgcatggtggtaaaagaaacaca

SEQ ID NO: 75545 - DNA, 455 bp, Oryza sativa
  unsure (1)..(455): unsure at all n locations
ctttaaaatcatntctaataattccttttaaacaacaatntattatttaaggattntaaacaagaaaagctcttaacaattataattagatcattaatgatcaaataattactgaactgttctttgtatcatttaggaattgagctctgaaaaatccgagaaaatttcagagagttgacttaatcatggagaatttaataaaaattaaatccatccatgctttatatttaggaaattttatttcccacatttaacttcacttgtaaattaaagaacatttaatataaattctattaataatttattaaataatttataaatcctgaaacgaanatcacgatgtgacaaatctaccccccttacaaagaatctcgtcccgagattcggaacggctagaaagaaaagggcatangtaaactgcagtctatcttattccataactccgataattattc

SEQ ID NO: 75546 - DNA, 432 bp, Oryza sativa
agcttgaggaagaggctggagtccacaacctataacttgaggtgtgtaattcagtcgcaaaaaatttcaaacaaaatggtgttcgtaaaaaatttcaaacttgaggttgctaagtatacttctgaggggaacatggtaaagaatcttatgttggctctcacgaggttggatgaaactgctgctggtgttggtacattccttcatctatacaagccgtttggtagtgctctcttgccagatcatgctgaaaagattaatcaagagactagctccactttggtggccactgagatctttggccgtgacacagagaagaacgaggttatgaggtggttggttgacaatatagagggagattcgaacactcctggaatcaaccgagtccctgtttctgcaataattgtgaatgggggtatatggaaagaactactc

SEQ ID NO: 75547 - DNA, 418 bp, Oryza sativa
  unsure (1)..(418): unsure at all n locations
gctttagttgtggatacatgaattaacacgtggctccaaattgtggcgttatccatattggttcttttggggtcttctggtacttcagtgcttctacaagattctggtgcgccatatagcatccaagtccttgtggaatggtcgtagttcagaacttcttcaggagtacatgggtgccaatggtaacaagagcaactntaatcctgaaatatgcaacccagagactatggaaggatacaagtacttggtttatggagagttacagaaaagccgaaagagtgcacacattctaaaagttgaagacttgaagtccctagttaccttggacaagatttggcgatgtgatagtgccttgctgctaacctccatcaacatgcatgggaacaacatgaaggacatggccctggcatttgcatta

SEQ ID NO: 75548 - DNA, 460 bp, Oryza sativa
  unsure (1)..(460): unsure at all n locations
atccttaagtcacctgcggcatgcaagcttgagagaggatgaaaggctaggagagagaaatgtaagtaggcgccgtcgagcagataagatagagcgaggtggaggaagtgagacccactacagtgtggggcctactatttttttaatcttttggtttgactgatatgtgggccctacgtgtaatgatttgatttttcaatgccatatggacgtgaggatcaggtcaaatcagtcacgtaagtgccaaccatgatggcctgaaatcattgttcaaactgttgtggtatatcgtttgcattgattntaggagataagggatgttgtgcccggtttaacggttgagggatgcgatcaaactcaggctttagagaagggagctatagtgaactntttcctccagattataagctgttggaagtagagcctgatctgctattangcccgcagtgtaatggaatat

SEQ ID NO: 75549 - DNA, 439 bp, Oryza sativa
  unsure (1)..(439): unsure at all n locations
agctttatggaaatcttcctacaccgaatactttatgcatatgaaagtgtctgccttttttattntttaacatgaacaatgaaacagaatttgattaattaaattgcttacctgtttctcttgtatgtgttgtgaggagggtcatgcaaaattggattgcctgagaaccaacaatgaatagtgatccttagtcataatggaacgcgtgctcttgagtcttgagtgttttaatgaccccagcgatttcttattgattattgnttttcttattagttggcttgtttacagcatattgttggcagatttggcacgttaattaacgatagtctatcagttacacacataatggatggtaatgctgattgctttggaaaaaaaatggcacatactaccatcctatngaaaggacaccacattgttattgtgctgtaaataccat

SEQ ID NO: 75550 - DNA, 477 bp, Oryza sativa
  unsure (1)..(477): unsure at all n locations
nnntgaaatcgattgcttntcattggaagctcaatanaatggttgaattattagctnttgctntcgttctcatgcatgcacggatacttaaatatactctggtacttttgtccttagtcagcatccaaacattgtaaggcacattntgtcaagtaagcatgtttgcgtcatatcatggctttatattaaataactgaaatactgaagtgtgtataggaatcgtgaaagcaggtactaataacatagacacaggagtttgggcaatctacatctgtatgtaatagttgttaaccggtaataataatatacaaatgagcaatctgagagcttatcacaatatgacaactaagctatagcttatacttaccgccaaccagatgtacggctacttgggaggttgtccagatcgatgtgaactccaattntgattntgtttcttcattgatttcgattgatggtttgaacgagataaaatat

SEQ ID NO: 75551 - DNA, 441 bp, Oryza sativa
  unsure (1)..(441): unsure at all n locations
agctngctcagaacaaatatgtggatttatctacactctctaatcaataaggaatgtaaagaaattgagaatatttcataaagtacatgcagtctgacaagctatataatcctggtgcgcacctgttctaaaacctccacactagtgccaggaccattcaagaatctgcagttacagcccaagatttcttctcttgagtaacctggatgataaaaattttcagaacagaagccttgaatgtaaatgatattagcataaaaaaggagatgcaatcgaaatacaaataatattttcaagatgaagattcagagagagagagagaggtgtggtggcatatccgcatattagcaatcatgcccctcttaactgaagagcataccaggattcaatgattcctaaccaatgcataacatcactaattcactcatgcccgtctcaact

SEQ ID NO: 75552 - DNA, 488 bp, Oryza sativa
  unsure (1)..(488): unsure at all n locations
cgcccatctcgtcgaacctgaaagaccaagaccaaaccatttttgagtactttcagtagggagcagtacgttcttcgatggcctacagattntttatgcacttacgatggcaggtcgaacagacgtatgcagttgctgttgtggagggagcataacagaactggcgtctttccaacacggtgcatgccaaagagcgtgcgtactccctgcaacagaagtgcatgtntagcaacaggggaacaactgaagactgttgaaaggagtaaggttcagaagcagagcattctcatccaaagaaaactgaacttgcaaactggacactagcattgaacttacatggtntccataaccatgcaccacaataaatacagaatgtttctccacaacaagcaccacaacaaaaacacccaaagcgatcaacagattctagagcagtatcnttgacaggattaaagaatactcggatatagatggttggtagcaatact

SEQ ID NO: 75553 - DNA, 451 bp, Oryza sativa
  unsure (1)..(451): unsure at all n locations
ctgctgcatgcaagctcgacatgagctccttgaaatggagggcttcttgtggngttatgctcgaagccggcgggcgccatggtcgagctcatgtggtcggtgtatatgaagtgcaacatcgccctgaacaccggcgcctcgatgtcgttgatgcgcgttggcgtggcggaggcggtgctcctcggctgcgccatcgggccgaggagctccgccttgagcacggacgagcgggcggcgagcacggacctgtgcgccttgtacgtctcgccgccggcctcgagagtgacgtccgtgccgtccccactggtgagcagcttgccgaggtggcggtgcatgtcggacggcggcacggagacgtaggacggaaattcggcggcggcgaccatggacgacagtagctgggcagatttctctgcangtatggagggagtggcggactgactggatgggg

SEQ ID NO: 75554 - DNA, 423 bp, Oryza sativa
  unsure (1)..(423): unsure at all n locations
atgtgttgttggactctgtgtgtgtgcgcgtgtgccattgtgtcatcagcatcactagctngcagtgcagatatgtgtgagtgaacttctacggctagttgttactactactacatccagatgtaaactttggtgtttacatgaagaagcaatgcaaatgcaatatgtggtgaaaaatcacctgccctgctcatgtcctacaacgaatctacaaaaactgtagcttgtgtgatctgttggttgggagtggtttatggagagattggcagtacaacgagagatgggcaatctgctgcctcatctattggacaagatgtgcagcagcaggtgtggtgtggcctgccttgctatgccagtgagagcagtggagaagagagagtagagtactgcatctgcatgccccttgattacgtacatgtcaat

SEQ ID NO: 75555 - DNA, 391 bp, Oryza sativa
  unsure (1)..(391): unsure at all n locations
tgaaaatggtgtgaaatggggttgaatttcctctctcggtcggctggcttttatagggtacccacaacggtcataaatgacatgtgggacccactagcagttaccctgccaaaagtggcacgtaatcgttgcctggccggttcggccgaaccacccctagtgggctcaaccagccccactttcgaccgttggattccaacggtcaatgtgatcgtggaacagtaaattttcgttgaaaactttattttggctttctctgaaaaattcatctgaagaattttctcanaattcaaaaatcataaatacaattttgaaattcaaacatgttgtgatgcaagaattaaattgttgaaaataaatatgcggatacataccaatgtaccttggtgac

SEQ ID NO: 75556 - DNA, 455 bp, Oryza sativa
  unsure (1)..(455): unsure at all n locations
agaaactcagctaaggtgctgcgatcgtgcttgtcaacttgtcaaaataagttttcaacaatattttcttaaattctcatatcatggaagcattttatttctagtgctgtaaaatttccatccgctatatataggtccgagtcatatacacctaggttntacctttccggaatcctcgggagagtgggtgcaaaaaattcgaatgctgcaatcgcttctccgccgatctaattgtcatctccggccatgtgccgccgcaagccaccatccacgcgctgtgttgttggctgctctggccggcgcangcggtgtgctcctttcaccacggagatacttcacggattgcgatgattacagttacaccgacgacgatgacgattatgatgacttcgtcgtctccacacccacacncacgacgacgacgacctcaacaacgtcgtcggtgaacaacggtg

SEQ ID NO: 75557 - DNA, 460 bp, Oryza sativa
  unsure (1)..(460): unsure at all n locations
ctctaagtcacctgcggcatgccaagctttgagctaagactgtagcaaagatggtgtataatgtatgctagtggngtatttagggtgacggtaaatttaaatttgcataatttctaatcttttactttaatgtcatgtttgaagggcgtggtattagggtcattctcgtctttttaaagaaattatcaatccaattaagccgaaagtgtcttctatcaaattatcagttttttactaatgttnttaagctgtgacacgttttctcgatgtttatcagcaaattatacaaaatttgagtatcatgtaccaaaatttaccataaagaatntacttataaattaatttttaactattaataaactgttacggcttataatcagtactcaaacaagtttgaggtagtaccgcgagatnttttttatgtaagataagaagtagaaacaccaaacgtatgccagtc

SEQ ID NO: 75558 - DNA, 448 bp, Oryza sativa
cattagtgaactattgaacatgattgaactgaagagcaaaaaagcgaactcgtctgaatatatttcacttgaatcaaatattcgtattacaattaggagctagatgaaaatttgaaaccaataacagctcctgatatacaaacctatacttctcacaagacttactaagattcacaatgtggacaaataattaactaattctgttctgtctcaccaagatacaaaaaaatcaagtaattctacaacatttatcgtgtatgcagtaaataacgttgtactgcgtgatccagcaggtgaagtgctactgactatatttgcagcatcatatagaatccagatgagttaacacacattggtttgatactcatccaaattcttgacggaagtcttaccattaaggagacttcctgaagagacttggtccaacgacagtgttggcttgtatatt

SEQ ID NO: 75559 - DNA, 418 bp, Oryza sativa
tacatcatacctgttttatatatcttgatatagagaaatatcggagtattagccgatacacgctagatctatccgatcggctatgctataaacatatataatcctggtattaatatatatgtccaactaactgaattataatgcctcggcatggtgaccgatctatcccaatcacttgatttaactatatattaatataagaactatatatcgttagtatctatagccgatcgaatagaattagttccttactatctatttataaccgctgatcgattcatataggacatcggctcaaagataaatgatatgtcatcggcacctagccgatcgactatcatttatagatttaaccacgaattctttgtctctacttcttgttgattacaggatcaaatcaactggcacgctcatacat

SEQ ID NO: 75560 - DNA, 487 bp, Oryza sativa
  unsure (1)..(487): unsure at all n locations
tctgaggattcagaagatccaaattntggaaggagctgtctgttcgagggatcctcgttcaccgaccacaagagaaagcggaagcacgcgtggccactttctccctcacaggcattcggacgaacaccttaccggcgtggcggcgtcacggtcgggcgtgtgaacggtgcgaggaggatgatgattcgtcaaaagcgaaggttgctgatgctctctaagtgaactgactgaccgacgcgatcctcgcggtttggactttggaggcggccgccgtcngtccgggcctcaccggcgccggcgccgctcgtgatgcattgggacttgggagccagcggatgaaaaattcagaggttgattnttatgagacggagagagtattctataaacttatcaaccgtactgatgtaaaaatatcttagcctctctcctctgttgctagttatcaccacgcaacattaagtttatactcctctgttcacatgtattt

SEQ ID NO: 75561 - DNA, 444 bp, Oryza sativa
  unsure (1)..(444): unsure at all n locations
agcttgagtttatgctcgttgtaaatgatatctattatatctttgtatacttagggcttggtaactagtccttcattnttttaattacatcaaaactatctgtatttagtgagtttaatgtttattatgttaatatattacaaaatcataattttgaaattattaacatgatataaatgagatagagctcgttaaccaggctaacgagcttaacgagccatctcgcaagtcaagccgagctatcctcttatctccgaggaattntgcgattcctcgaggtacttaaattttacactattacttttagtatcttaaggtacttactatctatactatctagaggtatcgaattttacacgtatctctgtaaaaattacctttcagctcatcaaaattaacaaactgagacgaactagctcattaaaataacttganngttcaaac

SEQ ID NO: 75562 - DNA, 460 bp, Oryza sativa
  unsure (1)..(460): unsure at all n locations
aactaagcttggagcatatatttgggttattaacgcactttctctgtttcagtatattgagnnatgtctactattactcaaggatttaccaaaccgctttggatatggctcccgtcacctgagtttgactggttatcggataccaaacacgatgttatcgtcaggcatatcatggtttaaaaactgctatatttaccaaaccgctttggatgtggttctcgtcacctcacaggttaacggctatcggatattacgaacaacacgtattaccgcgagtcacatctgtggttaaccatgctaaaagttaccgctcgagataaccgtgaggttttgttaacctgctcttactatatatcttcaaacattgcgtatctggagcctggacaagaactgattaaaataaaactctgccagattactactactacgtatcttgtcttcagtattcaaatgtttactt

SEQ ID NO: 75563 - DNA, 365 bp, Oryza sativa
  unsure (1)..(365): unsure at all n locations
catgccagcttgtagnntagtttgcgccacatatcttgtcgatagttatctttccaaaaatttgacggatattaatatagtacaatcatatagtgtagctatattgtaacctccatatattcacccatgtaatttgcatgcaactacaatggaattttgaataggtctatttgctttaaaaatcatgcaagggagatagaaaagaaaaatacaacctacgtacaagggaggagatatgggccattaccttcgtatatttttattaaagagaatagttaatagacgagaggaaatgccttatttagacaaaaagaataccgcttttattaaagagaatagtttaaagacgagaggaaatgcctaat

SEQ ID NO: 75564 - DNA, 488 bp, Oryza sativa
  unsure (1)..(488): unsure at all n locations
tagacaagaggagtcaaagttcagaagtgttgttaattcgtatgaagttgcgagttgccactgatatggaatcacctctatcaaatgatggtgtacggagtccacctaaatcatgcaagagatatgcagaaaatactttatcctctactcccaggctcctgaaggcggacagccctaggaatcatgatgtgttctccagggagaactcatttaaaagctctaacaaaggaagtataaagtcgcctgataatgctccaatgaggtctcaagcagttaatagttccgtgaccttacctcggtcatattccttggggaacttggcaaatgttaaaacaccaggtccttcaccacgaggtttggccaaagtttatttggtatataacctgagattatttctntatttaatttgttttgtacttcgctaaccccttagctngatcttctatgccgtttatcaaagcaaccatctttcaacaactccagtaatg

SEQ ID NO: 75565 - DNA, 425 bp, Oryza sativa
agcttgcatcaaaactttttatttatattaacttccacccatctctgctgtgaggagcattgtacatttaaatgctgcttatgtctaccatactgtaacccattggtgtgttaatgcacactgctattcactttttgctcctgtatttatcccctgattaaatcattattttcttctaccaacttatggaattgatagtgtcccatttttgcttgcaggctgatgtttacactgatcaatcaggaggatgtgttgcattcctttctaatgttgattcagaaaaggacaaagttgttactttccagagccggtcgtatgatcttcctgcttggtcggtcaatatcctgcctgactgcaagaatgtggcgttcaacactgcaaaggtatttgattttctatgtcaatggtcttctgaattacaacat

SEQ ID NO: 75566 - DNA, 488 bp, Oryza sativa
  unsure (1)..(488): unsure at all n locations
cgcatngctaatcctgataatcgagagcaagcacacatactatatcacatcgcatgtgagggtgttgtactagacaagagtaaacttcttgtgagcagccagttaactgacattgcagcatgatgcccatcagaggttgattggtccctgcacaaaggccacacaaaactttcctcctttccacgagcgctgctttttccctccttgcattagcccatttcttttgcttttccctttggcttggccttggctaacatagcctctttgaatcattccctacacttcacagcactgcactaaacgctctttggaggatcatgtgggctgctattactgtgtgagtgtgcttgcatgggagtggggagccactcttttgatgtgcccaaacatgattccaagattattttttgtaccaatcttgcagccttgcattctcatcaactggtgaagactcccctatcatcatccatctcctagcttatttctat

SEQ ID NO: 75567 - DNA, 435 bp, Oryza sativa
  unsure (1)..(435): unsure at all n locations
ncaagctggctggntatgggttggttntgtctgtggactattctggngataaacctgagcaaatatgctaatagcaagccataccctggagatagcaccagtgctaccagggcacgtgtccaaaataattttcgcaggttgacacgcattggcttattgagtcacgtccaacagtgtgacacataccagtgtcgaagctgggggagggtcctttgctgtgctctttgttcaggatgtgtngaggctaaccattttaagcctatttgctttttatttctgaaggacatatagtattttaaaatttaatgtggttatgaatgcatgccaaactcatagtcttggttgtgtttctttatgcacgaggttcctctgcttctttgtgctttctctacctggtttatcagctccatgtttgtgcacttcactttctgcaag

SEQ ID NO: 75568 - DNA, 495 bp, Oryza sativa
  unsure (1)..(495): unsure at all n locations
tatctntgntggattagtgattagntttattgcttcaaggcttatgacagtgttagaaaaagcactatgcccagaaagagattcctgttcttagcgccggtgaaataccttcaaaataataatgtgcccaattcactaaatcactctctccaaaataataatatgatactttctagtagtatcaatatgaacactaggaagtgtcccataagaccatactcccatccatctaaaatcccttatattatgggataaagagagtacttagatgcaatggaatgtgtccatgagacgagttcagtttctggacttaaacgctattttctaagttataagcaaatagacacgcctgcacaagtgtaatactccttccatccaaaatataagaatatagaaccgtcccaaaataccagttacttgcccagattcgtagtaatagaaaatgtcctatctgatactacgttcttatattntagaacggagggagcatgtgct

SEQ ID NO: 75569 - DNA, 465 bp, Oryza sativa
  unsure (1)..(465): unsure at all n locations
agcttatngcaatcctcaacgacgactgatggtgaacatgtgacggagatgttgctgcactggctgctgttaccggcgtgtacttccgcagcctgcagatcgctgctgctgctcggactctggcaatggctgtcggtgctaatctgtgatgcttcgacgacgacatgatcatcagctaatgccgcagggcccttgcagcaggtatgctggccgtagtagacaaccgtgtacatgatggggtgatcgccattgtagctgttggcgtggtgcaggtcttctcgctgctgcaccgtctttgttgccttgcacttctcttcctgcctgtaggtgcatctgtagtagctcctgctcaattcagattgatgcagatatatatatatatattagttggtgtttatactgattagatcttgataacacgattaatcaaggggtgtatnattaattggaaatggaaaacctatt

SEQ ID NO: 75570 - DNA, 486 bp, Oryza sativa
  unsure (1)..(486): unsure at all n locations
aactcagctctaccganactaaggggaagaggaggaacgaggagggagaacggtgagatgccctaccgagacgaggcggggcgctatgacgagaggccgactgcacgggagtgatctctccggcctcgggctggggaagaggaagaagacgagcgcccggagtccccttccgcgtcctagcacgcaccggctcctccggcacacgcgacggcggcggtcggcgatagagagacagaggggacggcaatggcgcggtggagcgagggagaatgggagagggaaaggaagggagggcgccttggtttaatatgagggcaatgtcggttcggaaaccgacctatggcggtcaatgagcgagcttgcgctcggctgtcgcggcctaaacggcgattgtgaggatgacgccggcggtgagataaatgaagaataggaatgggtgaaggagacttgcctcttgccactttgggaaagaatgtatgagagaga

SEQ ID NO: 75571 - DNA, 448 bp, Oryza sativa
  unsure (1)..(448): unsure at all n locations
agctntatgccacaattccagtgctaaagccctcagaatccaacacatgtaacaataggccttcacgagttagtaaatgaaaagcccatcgtgtagcaaatcggtcttctcatgttgtttattcatttatgacttgtgagaaatgagaatcaaagtgtaggtagagttgtaacttgtgtcaatatggccttgaaacaaatccgcacaccgtggcacgagctctctatgtaaagtttctttcgagtgaactaaggatttgaagcatgaaagtaatttttttttcttgttcattccattcattttccaactcctattagtactccaatcaactgatagagaccttctccaacattcatgttcacctaaacatgaacctcactaccttagtgaaactgagactaacatggatatttccacaccgggtgaaactgcaccttaagtaaccgca

SEQ ID NO: 75572 - DNA, 456 bp, Oryza sativa
  unsure (1)..(456): unsure at all n locations
nggcctgctggagttcacaactttatatcaagtcaaggcaatatatgctacaccagaccagacaaataatattgcttttttttctttatactagcataatgtacaggtccaactgatatttgttaagtatgaaaaaattaacaaatgattacatttatgttgatacatcgagtcatcaactgcttgatacattactgtgcaagaaactacactgttttacaatgaaataattaaattcagcaagctggagtatgacggtttgtctacattcctgtgccactcgagctcttgaaatgcggtcggagcttgagctacttgtttagcttccagcatatccatcatgaatgcctcattagctgctacaagactttccaaagcagtaacacacaacatgggatatgaaaaaaaaatgaaacatatatagtgcgaattaaagacaaatcatgaattacagct

SEQ ID NO: 75573 - DNA, 444 bp, Oryza sativa
agcttcttcgtcgaccatggcgcgtcgggcatgtccgtcgcgaagcgctgctccttggcgatggagaggtgcacgctggcggccatgcggagctgcccggagtgggagcccgacgccttccagcaggtggcggcgggcctgaagaacaagccgctcatccccctcggcctcgtgccaccgtcgcccgacggaggccgccgccgcgccggcatgacggacaactcgacgatgcggtggctggacgtgcagccggcgaagtcggtggtgtacgtggcgctggggagcgaggtgcctctaccattggagcaggtgcacgagctggctctcgggctggagctcgccgggacacgatttctgtgggcgctgagaaagccccatggcgtcgatctctcagatgtccttcctccgggttaccaagaacggacgaagagccatgtgacatgt

SEQ ID NO: 75574 - DNA, 358 bp, Oryza sativa
  unsure (1)..(358): unsure at all n locations
tccgcccacactgccggcactcgcactccngctggacaggcttgctgtttatctggagaggctggaggaggaggtttgcgagaccgtgaaatcgtcgtcggcttccttggcgcgggccgctgtggaactggttctcgtgagccaccaagttcgtgaccccgactttgtcccatggcgcgcactctatgattatccccctgggaccgatgcaagggctcgggagcaagtcccggaggcggccgacgcgatcgtctctaacttctgagggtcggcccctcaggtcaccttcaggcttgcctcanacgaggagagcggcagcgtggacgatgatgacgacttctgctgcgaggactgggac

SEQ ID NO: 75575 - DNA, 455 bp, Oryza sativa
  unsure (1)..(455): unsure at all n locations
agctntacaattgaaagaaagtacttatggcaaattggcttatttctggctttacgtcaatagtgtggtgggattcttcttttctcttcatttgcaagagccttgcataagttgcattgatagttgtaattcatcatatgttgaatgtctggatgaaaccagaccaatgccattagatctttatactaaatgtacttgtaatttgactaatcattggttataatctacgaggtactaacattttaaaataaaaaaaatatgccttataaaaatcaacagagggagtacctagttaagctgcagcaaaatcctcagaatagaagcagtgaggagaatatggctttggatgcctttntttcccccttccattttggtgatcaagatcaatgacttggagattctcgtatatctaagggtagctatatgtttcgttggtgcagcttaataaatgcaat

SEQ ID NO: 75576 - DNA, 503 bp, Oryza sativa
  unsure (1)..(503): unsure at all n locations
nggctccaataaagaccacaagaaaggccgatagctccccaccacttgtcaagggccagaagcgtgaacgcggcaaggggaaggtcggtgagttggcgccggagccaaaaaggggcaaggctgcgacgtcgatgccggtgagcaaatcggggaaagtcgtgagggcgccagcccaatttgagctaggcatgccattggtggaggacaatgtgttagctgtgatgggtattgcttgccgagagctacataagcaatacatgtagctaagcaatgccaagcggaaaatgagggagtcatccatagttggacatcacgaccaccagccgttcctatcgtcgcctgcctatataactataggctttgatgacctcttcgaccttttcaggatccggaagttggacactggtcttcttaaatgctactccttgntagtgcataccttctatacttgtgatatgactggactatatcttctaattaaattagttctaatacgtacatat

SEQ ID NO: 75577 - DNA, 435 bp, Oryza sativa
  unsure (1)..(435): unsure at all n locations
agcttgtgcctgtttctgatggactctttattctggcaacatccattggcagtgacatggcacgactgaggtgcttttgtgctcaaatcttggtagttactccctccgtccaagattgcttgacgttttgcatcctaacattagtccctaaatatttgacgtttnggcagtgaagtagtactagtgttgcttgtataagtggcataaaattggtctaaaaaaactttatgcttaaaatattcttgtgtgacttgcgtgactggtgctcattgtgctaatttcctgattgaaatgaccaccttgcactagtactattactaatttggggtaactgagtaattttcatctcttattaatgtagctcaccaatcctaaaacatctagcatattgggacagagggagtatcctcaaggaagtttaatgagcttgcacat

SEQ ID NO: 75578 - DNA, 497 bp, Oryza sativa
  unsure (1)..(497): unsure at all n locations
tctagaactgatatggtttgcactatcccctcattttatcttctgctatttactactgatattccttttacatgttgcttttctgattatggattggtttcttactatagaaagcatggtttagaattatttgaccaaatgcattcaatcacctaatgattcctcaagaagaagaaaacaatgaagtaaattgggtggtattatatatagtaggctactctacgaaattccacccaagaaacagttgattggagaagctgtaagcttctgcgactaatataaatagtcaaaatgtgtcaagtattcgtgaatgtatgaattcttcttttgggttctatcctanatgtntcacaaagacatgtcatcaaataaaaaacattggtgaccaagcaacattattcctttcatagatgagtggttcatttctgtgactaagctttgcataattcttgttgaatgatccatatatcttatgagtaattggtcctctatttaat

SEQ ID NO: 75579 - DNA, 403 bp, Oryza sativa
  unsure (1)..(403): unsure at all n locations
tcgtgctgaaaattntgttggattatgtattttaactagcttattttgcaccaataccagattgtgtagattaaagtcttttattacagtaaatttaccgataggaggctctacgaccaagtttatactcatgacaaatccgttctactttatttcaaattatgtctgatcttaatacctcttaaattagcctcatatatctctttttttcatgctgtgtaagttccaattcagaattacaattggctacaccacgggacatctcactaacttaaaggtgattttgttcactcttctttgagatcaactgtatgtacaattctgaatgtgccctctttttttttctatcagggttcatgtagtccatttggactaatcattcatgtctcttttccatattatt

SEQ ID NO: 75580 - DNA, 428 bp, Oryza sativa
  unsure (1)..(428): unsure at all n locations
agcttggtattaacttctcattggcttggttatgtccgatctgctggagttatagcttgtttaatagatttaggtataacttgatattcttatgtaaagctgtatcggattctagccgatacgttatctgtaataacttaagtcacttcatcggctatgatatgaatccatataattattaattcactttttcttgattataagcatttgatattgtctcggtttgggccgatctattctgattgcttggtttttaagggaaagatcaaattattaattgcatgacatttacctctatgaccgattgcaaagtaattatgtctaatgcatcaaagactggtcataagctaattatttaagttgtantaatgtacaatgactgactttaacttcatcaatcttatactgcatcattgaagttcgacatg

SEQ ID NO: 75581 - DNA, 429 bp, Oryza sativa
tcgcatccgccaacgccaacgcccacgccgccgtcttccttgttctacgttaatccccatggctctagctagctaattaccgggttaagtagcttcgaagcttgcaatgcatgcttaattagcggtaattgatccataattaattaattagttgaaccaaacgagggttaataagttaattaactcccaaatcgttgcctatttcgtgccggaagatacgctaaattaatagcgccatgtgagtattttatgcacacaccgtattacgttatccctgacgatcgaagggggagtccgaattagtcacggattaattagcaagttgcagtattattattattattatgggattaattagtgggaattaattagcttagtgtgttttggtgggtgcagggaggaggcggcactacagaggtgttcgacagc

SEQ ID NO: 75582 - DNA, 431 bp, Oryza sativa
  unsure (1)..(431): unsure at all n locations
agcttgcctccatctcctcccacttcggcatttcgatgctatagccgcctgaccccaagtggtgatggtacttcttcttggcggcattttctttgtttctttccatcatcgcctgcccttgttgtcctgcctttgaagcaacgaactcgtcccagggatcccttatctntgggaatagtgtgaagttcggtgtctgccccttcaggatgtatttctagtacagatctcccttgaaaccctgaaactgttctgccattttctttagagtccaccttttcactatgttctctgtacccgcgggaagggtgaatgtctcgagtattgtggtccacagcatctctttctccgaatctgggacaaagctctcatgatctccgcgtgcccttgttttgcgccagtacaccgtactgacaggcacgttattcccgcat

SEQ ID NO: 75583 - DNA, 423 bp, Oryza sativa
  unsure (1)..(423): unsure at all n locations
tcacccccctcccccctccacgtcgccgcttccaatccctatcgtatcgcctcgtcnagggtgagaaggagggtgggcatggataggatcgtccgngctaagtacaagctgggccgcaagatcgggagcggctccttcagggagatctacctcgcgtcgatctctctctctctctcttaccccctatccctcctcctcctcctgcttgtcccccttcttcgattcggatctcggatctgatgtgggtattgctttcttcctcttctctgcagccacgcacgtcgacacgtacgagatagtcgccgtcaagattgtaagctctcttcctcctcccactctcatgttagaatttgcttcagtattcggttgtagcggaaattacgtnttgggctgattgcatcgttctgatagctttaactcgca

SEQ ID NO: 75584 - DNA, 447 bp, Oryza sativa
agcttctgacccatctgtagtgtctgagaaatgacaagcgtgtcagttgggtgatcgaaggatctccagacctccacatttgtgcggtctaacaataccagatttcctgaccctgtaaggttcatgctgacaacagacttgttcgctgtattggtggaccaaacaagtgttccatctgcatcatagagcactaaatccccaagttcagtaaattgaacagtagcattctctccaactggatgatcacggttggcaaaccagactatctcgggccaccgcagccgctgactgaaatcggtgctaacatagacaaagaagatggaaaaaatgtaggcatcacagctgtgtgcagatcctgcacagaagaacccgcaagcaaatgaaggaacgatgctatcatttatacttggaactgcaatgtcatgagggaaggaagaaatgcgcatc

SEQ ID NO: 75585 - DNA, 436 bp, Oryza sativa
  unsure (1)..(436): unsure at all n locations
ctttgacttaataataaatgtgaatgcaagtatgccatgttttatccctaccgagctccacatatcaaaccttatagtatgaatcaaaaaggcaaaactggtgaggaattcatattgatacacttggagagactgagtgaatcatctgaggaacttggctttcttttgcaaaatcatttgaaaacttccggaataagaaatgaataaagatagggtgattggtgctctaaatatgtgttgtctttcaaccgcccaagacaaggagaagcagtgtctcatgggaatcangggttagggtaagccaccgtgccaaagattatttaatctgagagagtacatataccttgcacctgtatctttgagatatgcaactattgtagcatcttccgatcaacgctcatgaacttgttacctttgttcttcactctggacgagc

SEQ ID NO: 75586 - DNA, 465 bp, Oryza sativa
  unsure (1)..(465): unsure at all n locations
tacggacactatgaaactcaagctggggggtttgttgatggtagttaccgtacaaatttggccatcaatataattaaaataatggagaactagctatacttacaatgcatgtttatttccaaaataatatatttccacttgtacttggagaataacatgttgcaggaatttatcaaaaaaataaagagaaaagtgaagaaacctcactcctaagcaaacaaatggataaggagggcccacatgttagaagcaaccgttggaaaccgacttttaattgccacaaccgcctaagggacccacttgctagcgacctgccaaagctggaggcctgctgggctggcccangttcggccgaaccctggcagctacggctccggctggccttacacgtggatgtcacggattgcttcttaatgacggctataagggtaaaatcgacattattgttttctacaatcgtcatac

SEQ ID NO: 75587 - DNA, 418 bp, Oryza sativa
  unsure (1)..(418): unsure at all n locations
agcttgaggcgttggaggagcaatctcccgcttggatctatggctcatcacttgaggtttgaggagatatgaggattatggatgagtttcangaagactgagcgacaagcggtggatttatggattaagggcaaacttggcttgggtctaccgcgggaataagagggtgatttggcgcataaactacgcgggaagattagcagccatggggatttggcgccctaaagaagaggagagcgcgcgaggaggaagacgcatgggcgtgcagggaacacccgatcccctttggcgagaaaacgcgttgaatagcggcagcttgtgtcgatacggtgtcgttgcgagtctcgatttgtgtatatcggctctcgccaggtctgtagagaagctgtgtctctttcctaanttattgtctttcacc

SEQ ID NO: 75588 - DNA, 496 bp, Oryza sativa
  unsure (1)..(496): unsure at all n locations
gacctataaaactcagcttnagtacagaagaaggcggatcacagggagctcttgcgcaagataagctctatgtgggttgctgaggataaactggaaacaacaattcttgacgctatcaaaaataccacagctctctgaggtttattgagtttttgctgctccgttagcttatttaaattcattataaaatttgagaccaaagacatttcttatgctatatctcttaatatggtgttagcaacagaaaatgctatagagttaagattgattatcctatgctatatttgatttaatggaattcacttatcttttgagcatataaatactagccctttctttatgtgtgcaagctttatgcagtcantttgcccttgtgtatggaagaagcaaaacttactagaggcaccaatattattctacttccctctctgtagtcaacagcaaaatacaatatgatctatagtatgatattacaataggaaatcttcagagtata

SEQ ID NO: 75589 - DNA, 453 bp, Oryza sativa
  unsure (1)..(453): unsure at all n locations
agctntgccgtgacacgtctcatgtgttgagacgaggctcatgtgttgggcagtcgcggagtgcgggtaaagtgtacatccactgcagtgtgagtaaaccaaatctattcgaatagtcgtgctcgcggttattgagcaccgggacatgtattacacttggctaaactctaaattcttaacttgtgtgggatgggatattgcatgatgatttctatactgatggagccacttcctgaggggcgggaacgtggacgtcctcagaaaaccatgatgactcgatggcgggaagctatccttgggatcacaatggatggtggacagaaccgtcattgtttaatatgaacactggtactaaaatttgatcagtctgtgctaggtcttagggttgtgaaaaagaattataaaacttgctttgcgcaaaagaaccataggccatcctttgaaaaatacccc

SEQ ID NO: 75590 - DNA, 406 bp, Oryza sativa
  unsure (1)..(406): unsure at all n locations
agcttagatgtcccanaatatgagatcttggggataaacttatctgttaaaagtatgttggctggcttgacatcaccatgtcgtatggtacgacttgttgatgagtgcatgtaccttaaaccttcagctgattcaattgcgatgtttaagcgtaagcccaacgggagagggatgttggcatcaccatggagaatgtcttgaagatttcccttagcggcaaactcatacaccaacattggaacatccacttccaagcaacaacccaaaagcttgataatgttattatgcatcatttgcgattggatgatcacttcatttgtgaaatcatcctttcgagcttcatttacctcaattgacgtcttcacagcaaccgtagtattgtcttcaagagtccctttgtacacct

SEQ ID NO: 75591 - DNA, 451 bp, Oryza sativa
caccagactgagttggtgctgatggtcttcttctgactgtgagtatatcaggatgtcatcaatgaaaaccacaacaaacttgtccaagtattccatgaacactctgttcatcaagttcatgaagaatgcaggtgcattggttagaccgaacgacatcaccgtgaattcatacagcccatatcgcgtggtgaatgcggtcttcggaatatcttcttcacgaatacgtaattggtgatatccggaacgaaggtcaatcttggagaatacagtggcacctttaagctggtcgaacagatcatcgatcccgggaagagggtacttcgttttgatggtgacctcattgagagctcggtagttcacgcacatactcttcgtcttgtcttcttctcacaagatcaaggagcccccatgggaagactcggcgttgtaccctttcttcactctccactgt

SEQ ID NO: 75592 - DNA, 297 bp, Oryza sativa
  unsure (1)..(297): unsure at all n locations
agcctntgcattaaagttcccttctgatttaattatcatataataacttgtataagaactgtagggaaattattttatatcgcattaaaccatgccaaaaatgaaagcattgaagtctctgttccaaatagngtctggtccactttctaaaatatgtctggtgcactttcaactttattcattatattctagcgaaatccctttggaagacctccacaagctatattgtatccaatctttcttctgtgttactttttattctagagccctcatcaatccttctttctcagatactcc

SEQ ID NO: 75593 - DNA, 513 bp, Oryza sativa
  unsure (1)..(513): unsure at all n locations
acactatgatactaagctaattccaagattcaatggtatngagttcgttgagattattattttgagtatgtactgagcagaccatgctgctcaagcgacagctccaagtgagctgttttgattggttattgctgtttaagatcatctccagctttccaatttagctttacatatttacgtttcagaaagcagcacaagttcagctgtttcttgtgtatacagaataaaaattgacccttcacagctggaagggaagttacttatactgagtaaaggtttcaagcaagaaaaacatgttatgaacaatcagtaaattgttaaccaactagctgacaggagcactaatggttattccaatgacttggagacagataagtaataattatcttaatgacaaccatgcatttatccaattaattgttgtttcatgcattttgcttagcatagtgactctgcactagaattcaatgggcctactgtcctactgtactacnagaccttatcattgttcat

SEQ ID NO: 75594 - DNA, 463 bp, Oryza sativa
  unsure (1)..(463): unsure at all n locations
agctntagagggtgggggtacgattgtggaatatctcgtggaggcaggggttggagatgtgatgcaaggatgcagggaattgggtggaaggttataaatataaacattattttattctaattattataactatttgtattcaaaactttaaaaattaccaaagcggtgtagaatattttaaaaaataagcatttatatattaaaaatatcatcttcaccaataagttaaaatttaaaacaaacgaacttatcttttcgcttatgcttatacttatcagcctaaatttcaatttttaactctaaatttagagttgattntaggggttttcattgtagtttatttttcagcatttgcttttagatcattaagaacatatataaaagttttattcataaattaatttttatttgcaaatattatgctcctaaggaaatggagctgaaatgttatttccaccaccca

SEQ ID NO: 75595 - DNA, 449 bp, Oryza sativa
  unsure (1)..(449): unsure at all n locations
tgataccacttgatggcaacgggatgctcgaccttccatctatgtgtattgaagatagttatcgatntagtggaaacttgacacacacgatcaacatgatctaaaccctgcaatcgcagcgccacgtctcctttggttattaatcgtgccgaaacccgattgacctcgttgagaaggcttatccctgcgtgtgaattgaaaaacacaagcaagagcaagaaagacaacaacttaattacagataaatgattaatcaagaactcgaagttgaggttccacaaatcgaactagcagcgaaactgttatagcaaaaataatctaagcaaaacccaaccctaacacaatgacaactactgaatatataggttatagggtcgaccttggactcatggacacatccctattggactccaacatgatacataacccaacggacccaaaaacggtga

SEQ ID NO: 75596 - DNA, 437 bp, Oryza sativa
  unsure (1)..(437): unsure at all n locations
agcttcatgtttgtcatttgggttcgatttactgtattcttgctcaaaagtatgcgtgagcacgggaagagtttatcccgtacgtcctcgagggaactttctcgtgttnttctatgtcgcccaaaaaatcgtcaaaaaaaattaaaatgatttagtaagatagattagtatagtgtgtatggcttcataaacattcaagtcatatttaacatatacaagtagacaaaaatatgacaaatttgaccctaaatataacacataattcatggttaaatttattatnttgcttgatcaaccttatcattttttttcaaattcttttgatattcttttagatagcatgcataaaatagggagcgtcctctcgagggacaaaaatcaatctcacacgacatataatgcatgtgtagttcgaggcgataatatattcttttctt

SEQ ID NO: 75597 - DNA, 517 bp, Oryza sativa
  unsure (1)..(517): unsure at all n locations
actaagctgggcttatcaatatataaatcaaaccatattgggctaatatacaattatatgtggcatcaaattagtattagttttatagttaataataatataatntgtatgaatattgatgatcaaattttagtgtcaatgccattttaaaaacaaacacatcatatatttctcaaaaaagagaaagtatggtatagtctgcaacagaataaagaaaaaaatgcacacactttgattgggttataatattcatatattacttaaaaataaaacaacaaataataaaatttgtgtataaaaaagataagtattaacaaatattaaaaactgacaaatatagtagttctactaatatcaatatttacatactattatatgaatgttggtgtgaaatgtcccaatanaaacatgaaaaatagttcagagagtggttgccctataatagtcacatatcatatttacacgatatacaaaagaattcatatagcatattacctacattataaattagtaattg

SEQ ID NO: 75598 - DNA, 446 bp, Oryza sativa
  unsure (1)..(446): unsure at all n locations
ttttntcactcgtgcttaaggagtcagtgcaattctcttcacaagttgttacgattgaattcaatggattcaacgacttgctgttctcgtgagattcagatcattttgtaacacactgaaatcttttcttctggcgaacaggttcaaaaatctgtgcagattctgcaggataagcatgagatttcagagacaccgaacgagttctccaaacttcaaatagcgcatgagttccctgctagagcaaatgaagcctctgctttctcaacattcggaagggaaaatgatcacagcacacaagttgcaaaacatgaggttgctttcatgccacttcatgcagtaatgcaatgcantctcctgctgtgccagtccaaagcagcaattggtatattntgcatgcactagtgcctgtctctttgagcacacaaccagatcagcagcagccgagt

SEQ ID NO: 75599 - DNA, 442 bp, Oryza sativa
agcttcaacattgatatgacaattatattacatttgctgtcaaggattgtatgggaccacccacttgttgtctaaccttgcacctctgatcttaacacaatgtccatcatctctcctcatgtataaagagtatgtgtcgtttccttgtgttgatagaattgtcaatgatagtgaaagcaacgctcttcgtcgaccatgcaagcacactttttatttagttcatcacatggtaatgcgcatatgcttgatgactagatgatgcaatatagggttattatctttgtatgttatctctgcgcaaattactttatcatatctatctaggagtattaactatcgtctggcttcatgatcaatatgatatgttaatatggtaaggccctcttttaaaacttggtaacatgagcgtacgcttaatacttctcccgaaatatttattttt

SEQ ID NO: 75600 - DNA, 493 bp, Oryza sativa
  unsure (1)..(493): unsure at all n locations
taggacatgtacaacggtctntattagtggtctctctattgtcatgcaagtaaatntgatgatatggaagaaagagaaaggagtatggttgttatgcatgacaacggctcagagtcgactcttagcatttattagagcaaattttgttgcatggtggtgaaagaaaggaaagaagagcaagacaaagtatcttaatacattaatggttagagaccatattgtctctaactgttgtaggatgctaatctctaaataacgtagagctcgtaactgactctacctttgtgcatgccctatatggatcactaatctggtgactctaccgcatatctattctttttagtttacttatcattgctatgaattatttgctccacgtttcttaaactatgaaggtagcccgcgtgatgcgcgggcatgtattataaattatgtttgaaaagacttataatgcataatatcagccagatgacactgctatttcaaagtattg

SEQ ID NO: 75601 - DNA, 351 bp, Oryza sativa
acatggaaagcatgggtgcttgtagatcataacaagaaacataacaagaaccactagggtttaccaatgcatcacttaaacagcaaaaaaataaataataaaaaaatcgatctttatgatccaacacggaagaaggcatgcgctatctatcataacaagaagataagctttagccaaaaaacaacacactattaaggagcggacctgacatgggaaattttacaaattgctaatattagtgctgcaccacgtacaggaaaatcgggaacagaaggttaattattggagggaggggcgaaaaaatatacccaatctcaatccaagcccagatggatatcaaaatctacagca

SEQ ID NO: 75602 - DNA, 361 bp, Oryza sativa
  unsure (1)..(361): unsure at all n locations
acactgtacaatactanagcctaggagcactgctgtgccaaaccacaccagatcatgcgcatctattgacttatctagggatatcggaatgacggcggtagatgccttccatccatcagagtatgatattcgcgcccttgctcctatattttaatgatatgcgtctctgacagcatatgagccccatccagaaggaaaactgtcatctgtgcttgcctgacatgagaaagccggctctaggagagtgtcgtgataattgccttgtcatgatctgattcgctgacgtaatgacgtgcatcagtccgaacttgcgggcatgaacctggttacatgcttgcgaccgtatagtcagacctggcca

SEQ ID NO: 75603 - DNA, 375 bp, Oryza sativa
agcttcacgaatcttcgagaaaacccgtgatctttaatattcgataaccgcaactatacgcaaacaatcgaaaacctaaacaaaagaccaaaagaaagatcctatttagactaattagtagtgccattaaatagatctcaattttacggaattactggaagtggaacggagtcaatcggatgagcggttgagaaaatatgaattttggaagtttaattggagtttctggaataggagaaatggtttatggaattttatagaaataatattctcaagaatattattgacagtcactgacgcgcgggaccaaaggaaatgatttgtggaagtttggaataaggaattgatttatgggacaaaggaaaaaggatttat

SEQ ID NO: 75604 - DNA, 473 bp, Oryza sativa
  unsure (1)..(473): unsure at all n locations
ctattaggtcatcctgttattagattgattttggttcagtatatttcatcttcattgatatcttggtacagattagtatcggagtactagccaatacatattaggtttgcttcatcggctatgctatgaatctatataatctttactttaaagtatttttagacatacgtgatttatactgtctcggcgtgctgtccgatctatcccaatcacttggtttaagcataattcggattatatagttattgatatctatagctgatcgagtagatctatttattcttgcattacatgttctcactaccgatctgattcatatcgcatcgccctggtgttaaatgatacgtcatcggcagtctagccaatctgactattgttatggatttaaccttgttctnttttatttcttgttggtagcangatcaaaccaactggccgatgacgtatanttcaaattaaaatcccaataacaa

SEQ ID NO: 75605 - DNA, 414 bp, Oryza sativa
agctctatagaatggttcatatcttatgttttctatatcagagttaagatgtaatctaatcgggtgccttctgcttacagaaattggtcgatagatagatatgcggtgatattgctagagattgtgtcagatatatgatatcttgaccaactccttcaactagattagtgtgtcatgaaaattgaaacactaatgctaagaacgccatctgacataacgaaatttacctcttgttgaagatctaaaatgatgcagcctaacccgaatgcataaactcgacgaaataaaacataaacgaaaagggtggcgatgcaccgcgattgaattgaacctgtctgttaaaaaatacatatgtgttatggtctatctatacccgaggaaacaagatatgcccataccagacacgaccattat

SEQ ID NO: 75606 - DNA, 450 bp, Oryza sativa
  unsure (1)..(450): unsure at all n locations
agcttgactagtgttntacacaaatgtaaaagatcaatgggttgagccatgatagaacaaaagaagatgcccgagtttgaaaagttttgtgtagaaaccacaccttgaacattaagcagcaagaatattatcaacatagcccaaaggtaccaactgcatttaattagcatatatgttaattagtttctacataaaattctatcgaaggattataaataactagtacttgtgtgcaacctaaatctttatccattagttacttacctaatgcctacaactttcttgaaatcatcctccagtgctctaatcatgtatntgtaaaagttgaatttaggattgcccctgcaatgtttctgttatataaaanaaaattactgatgtaagacaatatgcctaaagaaacaaattagatatcccacttttcaaaaacgtaaaaaagtttcgaaattt

SEQ ID NO: 75607 - DNA, 459 bp, Oryza sativa
  unsure (1)..(459): unsure at all n locations
actcagcttaccgccttctttatntatgggcttccgatgggttgagctggctgagtcgctggggaactcttgaaatcttttcggaatttgacaaaaaataccgtacaactacggttaccgaccaaaacggtggaaaaacctccatcccattttcactatcatttccagaagatattactgtttccatttccaccataatcggttaccaataccgactgaaacgatcgatgcaaactggagatggcagctggaaatctcggaaatttccgtacccgtttcaccggccatctttntgttgaaagaatttttttccttatttcttcaacancttttaactactagatccacgctcaaacaattaatatattaactntgttctttagattatacaaatgaagatataacctaatttttagaatgttattatatttntagcgtggatgcttgctaatatgaaac

SEQ ID NO: 75608 - DNA, 355 bp, Oryza sativa
caagcttgtgggtctgatcatgttgtcgggaccgtatcttttgtgctccaccgtatgcgcccgcagaaacccccttgcactatttccgccactccggatgggcttagccccataacattgcttgctttgcggtgcactggggaagatgcttggctctctgggatcctgtaagctcttacccaccttccgagaaagagatgacgcggtcctcaacgtgagacacgttcactcttcggcgaggattccgaggactaaccgaagacgtggactctcgtaaacgtggttgatcacgactcgagcttgcggggatagccttcctcaactgttactgaagggcatactcctaacttggacc

SEQ ID NO: 75609 - DNA, 315 bp, Oryza sativa
tggacaagatgctcgtcttgttttttatatagcataccatctggacgcagccattcagttgcagtactcattcttcattggaaccttgcattgttgaatgatgattcacaacagatatgtcaaaacaacatatctcatgctgagatgttcatgaccatacctcctgactagcatggatgcatatttgtgcattattttgagatacagcagtgctcatgccaatatgaatatgaaagatgtagacatgagtttcatatgtgtgctgatggagaggatatgagctgagtcaatgtcattatctacaaaagtatcaca

SEQ ID NO: 75610 - DNA, 430 bp, Oryza sativa
  unsure (1)..(430): unsure at all n locations
agcttatgtcgatgatgtggttgtcaagaccattcatatagacgatttgattgaggatctagaagaaacctttgcaatcatccgcgccttcaggatgaaattaaaccctgaaaaatgtatcttcggagtaccattagggaagctgcttggctttatggtatcccataggggcatacaagccaacccggagaaaatctacgccatcctcaacatgaaaccgccaagctcccggaaagacgttcaaaagctaaccgagggcatggcggcgctcagccggtttgtctcacgactcggcgagcggnggatgccctttttcaagctgctaaagaaaaccgataattttcagtggggacccaaagcacaaaaagcctttgaagacttcaagaaacttctcactactccaccggtcttagcttcatcacattccgca

SEQ ID NO: 75611 - DNA, 493 bp, Oryza sativa
  unsure (1)..(493): unsure at all n locations
tagcttgttccttgttcgcaacattctcttcatgcgctccttatttgtgagataccacaccacctttgctgggcctcccctctgacttacttccttcaccttcactctttgctcgtttgtatcttgatgccccacagatagggcagacatccaagtcagcgtattccttgtaatacaaaatgcagtcgttcggacatgcatgaattcttctgacctccaggcccaacggacataatacttgcttcgcttcatatgtcgtctgaggtaaattgttcccctctggcaacagatcctttaacagctcaaggagttctgtaaaactcttgttcgaccagccattactagccttaagcttcatgagttccaacacgcatgacaactngctgtgcttcgacttgcatccatcatacaacggcatctggcaatctttcaccaacttactaaacttctcataatctctngtcgtgtgctctgcgtcttcaatgtcatgcaa

SEQ ID NO: 75612 - DNA, 423 bp, Oryza sativa
  unsure (1)..(423): unsure at all n locations
agctnggcaacaataacatgtggcagntntcgaggggcgttggtgttagctgcgttcaagaagtggtgctctggtgatttgcgctgatgttcaaagtggacaatcgatgtcttgcttgttttctgtgatgcatttggcaacgatgttgtgatagctgtggagtcnaagctgctgtgtcgctaggcgacaagcccggcaacgataacatgtgcttcacgaagtcgaagcctttgtatcgcttacaacaagctctttatcgatagctgttttgggctccgccattcttcctttttccatggtgtcggtagcttacgttagagtgttgtggttttcgcccagttttcccctaattaactgtgcattgtgaggtttggtctctgtttctccttaaaatgagacaccttcttctttatataagaatgt

SEQ ID NO: 75613 - DNA, 500 bp, Oryza sativa
  unsure (1)..(500): unsure at all n locations
ngctctgctacttcgttggaccctgcggccatctacacgcattggtttgccaatagctgtcgtcttgccagatctttatgtcccattggtagacaagcatatctgttttatgagtcgagatatccggttttgtagtttatggtcacggattaaatttcgacacttataagggtcacaagggaacttattccgacgttcctgctgtgcagaaccgagtccacatcaaatatagtagtaggccggtaagagttatgggccaaccagcaatgcgatgcatttcgaactgaaataagtttactttggatctctcatctttgtagaaaattgtatactcgatgttccagagtagtatagtgcccgatttggccaacgtgacaagttgactactgtcaccccgactgagtcagcatggaacccagatcgatcccaattaactcgtcacgttaactaanatcagacaatatactgtcatatgatctcgagtaccacctgtttacaag

SEQ ID NO: 75614 - DNA, 437 bp, Oryza sativa
  unsure (1)..(437): unsure at all n locations
agcttactctattcgagttgtcctgcatcttattgctctgtttttntcagaaccataaactgatacagtaatgagtgagtcattgttcttgctgcaaaacaaactgcgaatgacttcatctggtcttgcattcagaaagcaaatccgctggtttgagactaaaacaaatacatctcagaattcaatggtaatttataacatcagtacatgaccaatcattatcgaaagttgtacctcttgtgaatgcagcacatactcctgactgtgataaagcaaagatgatatcactggctccaactatctcaataatctcagaccttttcatcaagtaaggtagtagtgaacccatctccttgggatcatgagtatcaaactctctctaatttgtagtgaaaagaatatgaagatgtgttataatcgtaaaaagaacagggtca

SEQ ID NO: 75615 - DNA, 488 bp, Oryza sativa
  unsure (1)..(488): unsure at all n locations
tgctgccttgtctcctcttggcaggctgttgctgtgttgaatctgctttanggcgtggagcttgattgcggatgttgctgccagcattgttgttgaagaactgacgttgcggatgaacaacagacgaagaacctccctgtggcataggctggggtcctaaagtaagacgcggcttctgattactcccctgttgtgccttgaagtgagcaatccggcgtttcttctgctccatgcgattgtacttgtccttctgacgaatagccttattcactaacttctggaaatcaggataatctccagtcatgagtgggtaagaaagctcatcattaagttcttccaagaacttctcctggcgctcttcatcattgcgcacatcttccggagcataacgagcaagacgattgaactcgtgcagatacttcgttacagagcgagatccctgagtaagcgacctgaactccttcttcttgagagacactactnctgat

SEQ ID NO: 75616 - DNA, 456 bp, Oryza sativa
  unsure (1)..(456): unsure at all n locations
ttacaacaacttaataattacttatgccgatcggccaaatagacttattagagaacagcgggagcttgactacccattcacaagcacaccaactatgggtttaccccattaaattctcattctagaagaagcaatcggaacccgcatcacttaaagactaaggctaaacctgcaaacaaaaggttatatcaacagcaagagtcagtacattaaacaagttaatgtactggcaagcacaagtcatactacatgtaaggcatatattcaaaggaaggcaatatgtagttcaatttcagcataaagcaagttttgtttcacaattcttttgtanaggagttgatgcttcaattaacaaagacaagttntaaggttcattattaacttcttcataattccatcataatcaatctcttattgccatancttaacgagataagttcaatatagtgttattca

SEQ ID NO: 75617 - DNA, 447 bp, Oryza sativa
  unsure (1)..(447): unsure at all n locations
tgcccgncggcacatcgaacacacactattcggggtttagtttcatgcgcgtggacctaaagctatcgaaagtctcagctaagtccgtcaacaatgtttcttggtggtggcgcgtctttaccaccaagtcatcgacataagcctcaacattacaccctatttgattactcaaagtaatgcgagtcatgcgttgaaaagtagggcctgcatcctttaaaccaaaaggcataattgtataacaaaaggtgtctacaggagtaatgaaagcaattntttcctcatcttcccctagccatgcaaatatgatggcatcctgaataagcatctaggaaacacaaaaggtcgtaccccgcagcggagttaactatctgatctatgcgtggtaaagggaagggatccttanggcatgccttattgaggtccgtgtagtcaatgcacatccggagc

SEQ ID NO: 75618 - DNA, 460 bp, Oryza sativa
  unsure (1)..(460): unsure at all n locations
catcgnctaacaaagaggtttcagaacattttatatccttgctattacagttattcatgacgtccaaatctttcataacctcaatctactcgtcacctaagcaacaacaaatgaagatgaaaatactttctgttaataattacattgtatgatgctggtgctgtagggttttgtagttgtggagacaaatttccggatgtatgcgtactcaacttccagattacattgtgaaattctgcgccttttttcaaggtacgtgtggtgctagatgattggcataacttagctcaactatgtactggttntttaactactgaattactgatccatagcttctggtgcatccttgaacgactttcctctatttattattaacattntgccatatgtntggcatgcaaaagagncgacggcagggagctaaaggggcttctaatanncccttccattcaacaatttt

SEQ ID NO: 75619 - DNA, 455 bp, Oryza sativa
  unsure (1)..(455): unsure at all n locations
cgcaagagtattcctatttagtaagaggatacagctcaaccttttggaacttgcgaagnatttccagaagaaaatgttattgctttgtttattcaagacttgacccaagtgtttgtgggtgtttcaaactgaattttattcatgaacattaacctgaattggtcaattctaatgatggaaactgccagcaagtatactgctactgaacattcatttgcatgatctgtgcagtattgcttgattggaatagcctgtctggttgggtcaatacccaagtttcacagtctgatctacgactgtgtgctgatggttatagaatgtctcacagtaacattataaaanttttgtgtccaataaacctaatcctatcttatacacaacgtttaagttataacaagaagttcaagtccaacgcatatacagtaatgtcatgagaataatagcttttatgaaac

SEQ ID NO: 75620 - DNA, 431 bp, Oryza sativa
  unsure (1)..(431): unsure at all n locations
agcttgacattnttggttggatggtntaatcactctcttctctgcacagaaagacgctacagtcctaatgctaccaattgcttcagttacaacttgacttgcatcttcatacatcacctgtagaaatcgctagcagttagcaaaacaatatttactaatattgcaagaaaaaaattcattatgcgatgccaatcatgaaatatgtcagttgtaataccaaattaggtgtcatctaacaaaacacacatcttcatcaaatgtggaaagtgtcaggattgtctgtgaattttttatataaaaaacagaaatggtagaaattgctttgttcatactagggactntgttttcaccttagcatcttcactgaaccctttcaagaacttcaatggtacantaatttgcanacccaccaaagggatcggacacatgat

SEQ ID NO: 75621 - DNA, 502 bp, Oryza sativa
  unsure (1)..(502): unsure at all n locations
tgaccgatgtcttatgttgngctccgtcatggtagtgtaagttatgttagctattgatgtggtgttgtagttgtagttttcgctcagtttttcctaattaactagacactgtaaggtttggtcctgttttctccttaaaatggaacaccttcttcttaatataaaacgtcggcaacggcctgaccgttcgaaaaggaataaatcaaatacttttgaaaataaatttaaccaatagcttaaaaatgaataaatgtattttttgaagtaggagtaaacaattatatgaataagttgaataagctctntagtaatggattaacctgagagttgcgaattcatgataaatagaaggaaggaaacaaatatactatgtggataaaatgaaatagaagaatatgactactatctcacacactcggagactatctatagatccttggcatatttcaaaagtaccaaaatgccattatctcactacttctcttttttcccatataaatgg

SEQ ID NO: 75622 - DNA, 401 bp, Oryza sativa
  unsure (1)..(401): unsure at all n locations
gctgattntgaaaaagctcttgatacaatttatcatgatgctattctgaatgaaatgacagctatgggtttccctccccaatggaatgaatggatcacgagtatgttctcgtctacctcaacagttgttctattaaatggcgttcctggtaaattttttcaatgtaagaggggtgtaagacaaggggatcgatatatcctttgtccccccttctgnttgccataggagcagatcttcttcaggctataagcacattagagggggatattatctttgcctatccctgttcacggcgatgataatttcccagtgatccaatatgctgatgaacatccaatattctcttggtcacgcctttgcacatccctcctatcangttccctactgcgacttgaggagtg

SEQ ID NO: 75623 - DNA, 491 bp, Oryza sativa
  unsure (1)..(491): unsure at all n locations
actaagcttgcccataggtcttccaaaaatagctcanaaacttggtgtctcgatctgaaacaatcgtcttgggcatgccatgcaacctcacaatttcactgaaaaatagagaagctatgtgggaagcatcatcgcttttatgacaaggtataaagtgtgccattttagagaatcgatcaacaacaacaaaaatcgaatccctccccctctttgtcctaggtaatcccaaaacaaaatccatgctaatatcttcccaaggagcactaggaacaggtaagggagtatataatccatgagggttcagttntgacttagctttgtgacaggtgacacatctttgcacaagtcgttgaacatctcttctcatcttaggccaatagaagtgatcagctagcatgtcataagtctttctccatccaaagtggcccatcagtccacctgcatgtgtttcctgtaataacaagagtctaacagagcaatgtggaacacac

SEQ ID NO: 75624 - DNA, 455 bp, Oryza sativa
atccttaagtcacctgcggcatgcaagcttctttaagtcaaattttatgaatcatgatgaactttcaataattatatggggaaattctagatgtaccgtatttaataattttatataaagtggactacccatgcctaaaattctagatacgtcactagaaccatataagtattttataccaaccttttttaagaacagctcgtttagagttctttaaattcaaccttactgtagttgccggaaaaaaaggaatcgacctagcaaaggtcggtcaacggtggaaaaaaaggaattaatgtagttgccggaagaagctcgccaaagagaggtctttgttgtcatcatcgctgaagggagtctacttgtctacacatttccttttcttcatcggaggaaactcgctggagggaggtgaagcaagctttgcacccgctatcatcatcgcccattgggag

SEQ ID NO: 75625 - DNA, 454 bp, Oryza sativa
  unsure (1)..(454): unsure at all n locations
tagtttactttccttggaacaactgannttgtacttgataatgtctagtatcatctcgattctagcaagaaatcgcgtaaattatcctacattgattaagatgttctttcttctcttctatcaagaaaagaacttttgagtgcaagatctaacaattagaagtgcaaggatggagctttcaaagaacaaattttcaaatggttaatatgctattaggtttaggaaattaagacttacctcattcgttgttgtatttgttaagcaaagatgtgtgtggtaagcacaaaacccaccaaggagcaatgcaattatagccaaaaagaccgctaagagtatctgtgtgttatgcacagcaagcagccactgcanaagtgatcgtgagttaaagaagatattcaatgtgttttctaattaaagactaagtctctttctattaccatacctgtgcacatgt

SEQ ID NO: 75626 - DNA, 430 bp, Oryza sativa
ttcatataattaggaatcagaatcattcttgtataacacattttgtgaagcagccataccttgtcatatggaatgatgatagaggaacggaggaaaacattctacacgtgaacatacatcatatcatagaaggacaaacggtttaccaccaagcaaatgtgtaattttcaatgcatatatgcaaatcaaatatatatctttttggtagattttttttataaaaaaaaacattaactcgaataaaaacctcttagcttcaacctcctaatttgattcgcactgtaatccatacataccatctagcatccttataactaaatccaaataaccaccatctaacatcatttcgaccaaatccaattatgcttgtaaaggttaatattcaacatacaatacaagatatgccaccagctgttgagttcatatcata

SEQ ID NO: 75627 - DNA, 436 bp, Oryza sativa
agcttagggatcctagatatgggaggaccctcttttccagcccaagacggcgttgctggtgggttctcaaccatgagagaacgctattgcgggtctgacttctaatccgtcccaacgggcgtgccaaaagcgtgttgatgtaaaaacacgagggctgggagatctgcttaactccattgcagggccaaaacttgcctttgggtgtgtgagcgtgccagttgatttgatcctgcaagcaacaagaaactaagacaaagaaaccacggttaaatccataaacgatagccgatcggctagtcgccgatgacatatcatttatctttgagccgatgtcatatatgcatcgatcggcagtcattaataagtaagaaagaactaaatctactcaatcggctgtagatattaacaatatataatccttatatcgatatatact

SEQ ID NO: 75628 - DNA, 518 bp, Oryza sativa
  unsure (1)..(518): unsure at all n locations
acacttgatactaagcttattaagggatggcataagctatttcatgacatctcgggacatgaaactaccaatatatattcacgtggcttcaccaggaccacttaagagtccctagactgataagctaaaatgatttatgctgtatgacaaacttcgcagtacaatcttcaccgtgtaccactattgtagggtcttagccatacttcatatattgccgcataaattcaaatgcactgaaactgaacaaatggagtatggacacatcaaatatttcgtaaggaacgaaacagtaaaacactgatggcttcttaataaggtaaaaaacatacttacatgaaacaccttcttccatcacatctgccatcttgcaagaaaatgacataatcttcaccgtaagtttgtccatgataagaacctatgagttaccaaaacaatttatgcgtatcacattctcccnttttgctgcaaagtgctataaaaaatatttctggccatatataaaacttgaacgccatatc

SEQ ID NO: 75629 - DNA, 433 bp, Oryza sativa
  unsure (1)..(433): unsure at all n locations
agctgtgttaagctagctattgcatgagagcttacacttctctttttttttggtatctctcccatccatgtaagcttatagtaagcttatagcttactattatacttgctctcatagaatctgtgcttagtccaaagtggtcaagctccgtataaacagagcaattattaatatgtattactaaatactaacatacaaatatgtcacatcaacctattaatcgtctaaaacacaaaaatataaatatagataatttactacattaaaaactcaacgtataaacatgctaaatcaattattcctcacattctttttataatattntaactcaagcttatctactgagtccgtattacggaaacaatagataatcttaagttaaaatatataatagagaccaaattgcactagcggttcttaaacttggtacgat

SEQ ID NO: 75630 - DNA, 497 bp, Oryza sativa
  unsure (1)..(497): unsure at all n locations
tctcgagctcatcggccttgagatggatctccccgtcatcagttatatcccttccttcacaccaactntccatttttcatgcatgtcatggcttccctttcttggtatttgtcccttttctcttggaagtagatgtctaaagaagtaggaagtgttgctttcaagtagatctgttgaatggttgtttgttatacattggataccacgtgagatcctgtatatttattgacttcacactcatacttgggctgatagatggtactaggttggagaaaagtggtcacatgtctattatgtgcttggtcttcacattcatcaataataatctgaacatgtaacggaatttcagtggggatattatgtcgntgttntatgatccgttatagatgttgttttgttggcgtactacttccaagtagataagtagataaatcaaatgggttgtcgtacaatgaatagtacttgatattctgtaaaattattgacctcattcatac

SEQ ID NO: 75631 - DNA, 81 bp, Oryza sativa
  unsure (1)..(81): unsure at all n locations
agctctttcctcctctcaatataatctgtaatttaatccacaactatgtaatccacccttctaaactgntatatgaaattc

SEQ ID NO: 75632 - DNA, 469 bp, Oryza sativa
tacttcctctaaccctatcaataaaagaagccgggaccttttactttaatcttagggaagcttcacaaaattatactatatagtatctcgggcacatgatacatgcgttcggtatcgtggtgccaaattaaggaccaactaatgcgtcctatgtgtttcgacaggacatgttggagatgaatcgccaatattcaatgcactgtagcagcaatatcaattcatttcgtcgcaatctagcttgtatcatatatttgaatgtattatatatctacagaaatatactttctctgtttcacaatgtaagtcattctagcattttccacattcatattgatgttaatgaatctggacatatatatctatctagacttattaacatcaatataaatgtggaaaatgatagaatgacttatatcgtgaaacggatggaggacattgtatggtgctcatgggagctgttatatatacc

SEQ ID NO: 75633 - DNA, 428 bp, Oryza sativa
agcttccccagctgccgcagctggtccacgatcacgctctcgccaccgggacgaaccatggcgtgatgttctcgtcggaccatggctgcctgtacccgctgctcccggagatcccgttctgcctcgactccggctgcggcgccgccgcctgcgacgacgacaagcccgccggtttcgcgcacttgggctccgccgaggtgatcaattagccttcaatcgatctcaatttggtcatggtatgccgttctttaattacttgttgcttacaatcttggatctcgatcgatcgatcaggcggacacatcggcggcggcggcgagagtggatagcgagattgctgcagctgccaccgcaaccacttgccatgggcctaattcatggtgagtacgatgatcgatcacctcgtcctagctaacaccttgaattga

SEQ ID NO: 75634 - DNA, 522 bp, Oryza sativa
  unsure (1)..(522): unsure at all n locations
ggacactatgatactaagcttgatatctcaaccttggctcattagctttcaaaaggaaaactaaatgatatggaagcttggagtgaatactaaatagagcttgataatctcattttcggatgtgtttgtcctatgctcgttgcgcttgactaatgagttgatcaagttaataatgtgctaatatttactgcagaatacatgcttataatctcataaacgaagttacaattatttaacagttcttcctgctgctatatagtttttttttctagcatcagtttgaagatgggacaggtattttgagtgtatattgtggaggcttacctgtttggtttgnggtactcacgatggagatgagagaaatgatggagggtggcagactgttggtgagaaaaagcatcatggaaagccacagcaggtttgcttttggttttctaacaactagatacatatacatctgcacatgtatnacttactgagaattttaggatctgttctgagtcaatttagcccatgttatac

SEQ ID NO: 75635 - DNA, 165 bp, Oryza sativa
ctaatcagcgaacaccggcgttaaggcccatactgcttaaaaatacgcccccctgcatcatgcagactgtggattcataacatttgcacatggagcctccaacgcgtgagacctgatcgcagcgcatcaaccctgtcgcctgcgatatattgcctgggaaacggg

SEQ ID NO: 75636 - DNA, 310 bp, Oryza sativa
  unsure (1)..(310): unsure at all n locations
ccatcgcccaacgattcatactcgaagagtactctcggtttgacattggacatgacgacagttgaaacataattaaccacaatcttttattggtagacagtactactcgttccatcctaaaatataagagatcttaaaaggatgagacacattctctagtaaaacgaatctggataaaagtatgtctagatttatagtggtagaaaactgtttcgtccatctaaaattttntatattttgagttggaaggagtcataattatgtctcctaccatcgtcgaacataacgtacgtgtgcctttgggttatat

SEQ ID NO: 75637 - DNA, 410 bp, Oryza sativa
  unsure (1)..(410): unsure at all n locations
ttaagtgcagacaatttgtcatctctgggtttagagaanatatcactggttctctagncaccaatcgctggtactgcagcccgcggatttgacaaagtgggagaagagtgcctgctcgtatacttagaaacaacagaataatcaggcttcttatactgaattggttgagacctgtcacgccccgaactaatcccgaccggaactagcccgtgacgctccatattaacctgttaatcgataccagtcccaggaaacagtgctggtatcacaggaagacagaatatcacagcaacagaggtctctttattatagagtaggagtacagacatggtgggctgcggacagataccgagctcacaactgcattacataagcggaagctggaagccaagacttggaccaaacatcac

SEQ ID NO: 75638 - DNA, 426 bp, Oryza sativa
  unsure (1)..(426): unsure at all n locations
agcttaaactcatatggagcaaccagcttctgtcgtgtatgtgcgtccaacccctcacgtgacaatggcattggcatgaccaaccggtgtcccgacccaaccgatgaggccgacccaaccaccttaaacttcaacggaagtagctttgatgcttcaggcgcaattacaagcgtttctctagcaactgaatcaaccccacacaatttcaagagcaatccgttcgtcccaagccatcgagggggtcaagccaaggcgcagtatgttggcacccatcaagtcagtttgacctacgtatgccgactcaagcgcctctggcaaaccagcaaggggcaatggtcagaattagcggggcgccacaagcaaacctataagcccaaggctcagtggttnggcagncgacaggtcaattcaacccgcgcatgccag

SEQ ID NO: 75639 - DNA, 373 bp, Oryza sativa
  unsure (1)..(373): unsure at all n locations
tctagattctattcttggctatgcacatacagattctctatcttatgataagaataccaaaatactccataatgtataggaagagaatacgtcgacaaaagtatacaccaatgagtaatgtttacctctagatatggaagagcagacgatatttgtgtccaatttgaagggctcccgtgtgtaaaacacataccaccttctcctgatgcgcatttcacctgcatatccactgattngctggatatggctgatcttgtcccagtcagagcaagaggcccccattgatatgttaccaagcagtggcaaactacagtccagcaccaaactctttggctttacatcttgtagatatcctgngagtgttntcatgctg

SEQ ID NO: 75640 - DNA, 389 bp, Oryza sativa
  unsure (1)..(389): unsure at all n locations
agctttcggaagagttcnggtatggctctagcagatttcctttcctcttttgtaagctttgtacttttattataatactcttctttatacatttatggtattgaaatacttttcgtgtatatgagtacctaccttacattatgttcgggttatactaaatatacggctggcgtatctgtgagatggcttggtgcgggtataatggttgcttatacaattactctatgtcatgacgatgatattagagtagtatctggtagtttagacgtggtgtccaaaatacgggatatcattatttgggattatatattgcggatgagaggtgggcagctgatggtgacagctcagtacgggtattcctccgcgcctatatataatcctaagttaat

SEQ ID NO: 75641 - DNA, 481 bp, Oryza sativa
  unsure (1)..(481): unsure at all n locations
tgcactgtattgctnttcattggtctggtgcacatagacagttacacggtacaagtcagacagagacgatatttaccttttgacgaaccgctcagctcaaagttggagtcttggagctcggcgatccggtctctcagatcatgctcagttttcttggcaagctccttagcttcgcgtagctggtctctggtggattcaagggttccaaggtggggaactaatttttcgagggttgcggtcttcgcctcattcctaagatggattctctgcaccacaaatntatctttgttcatctaaagtgaccgacaggatggttgaggctatatatatggagacctacatttacaagacgagtggcttggccgagtgtctttntcagcaggcatacttcctcgtcttccttttgcttatttattacaattccctgtggatgcatttcatcatcccatcactngactaatattggtggacgagaatcttc

SEQ ID NO: 75642 - DNA, 367 bp, Oryza sativa
aaattcccttaatgtggcttataatccgaagcaaaatgcacttcaaagatgttttggaaatggtcagttgccgtaccactggaccagaatggattaatatattggagctttgaactttgatcactcataataccactgggatgaagtccgtcaagttagggcgcattctaacaggatgggttgataaattatcaattgacgaaaattgctcgtatggatgaattaaattctataattctaaccaatagggtagagaaaagttggttttgtaatacttttgcaggaaatttttaaataaactgtaccttttgaaatatggcacgaaccaatcatgccttgtttagctagtagcttgatcatcatcttc

SEQ ID NO: 75643 - DNA, 439 bp, Oryza sativa
  unsure (1)..(439): unsure at all n locations
tcaaccgtgtgggtcgaaccgattctatacaaaagaatcatgttctttctttntactgctattttaggcacttagctcgagatactgtgcattttgatattaagatgttatgggctcaacctgatgttcctgcttctagctctgaggtgtccatgatgtaagggagctatgtctatgattatgtctttccaatatcagagattcgtagtaatttccttgctccactgtttacgctttgcaactgccagcatcatggtttctttgaattagcaataatcataggtactgtttatactagcaattcatcattacacaaggaggaaagatgccacattgtgatgatgaactgccctctgccctactctngttgttctgttgttcagtgctgctgtaagtagtttcagctttgtgtgcaatacaaggtgtagtggagtttgat

SEQ ID NO: 75644 - DNA, 424 bp, Oryza sativa
  unsure (1)..(424): unsure at all n locations
agctcttcccgagagtccagaataagttcaatgtcaaagcacanaagcatagaaagcatgccagctacttaacctcatttgtcaagttcgcgcttgttgaaactgagctgaacctatgatgatcagacttattttggttattcatttagttatatttgcttttgagtgttgagaaccaagaaattttcagatggagtcttatcttatgctttgatgtaatatatctactggtttctcatacagatctgctgaatcacaaagttgtctgttcatgttgtttctactcttattgataggctgccttcccacaatcagataaaaggttggatgctttaatgttatgtgtgaaggaaacatttcttcacttgaacgagaatttgaagttaacaacacaagcattgtctgacaaggctacaccaatgga

SEQ ID NO: 75645 - DNA, 470 bp, Oryza sativa
  unsure (1)..(470): unsure at all n locations
tatggtcaaatcttctctcatcatatattccaaaaggaagattgaanaaacatatggatctagtgacacgcgcactgaaatcatacaggggatttaaggttccttgttttgttgttcacaatatgtgttagtagtttggatgtattttagatatagatagatgcttgttaattagtattccctccgtttcatattataagtcgttttaacttttacccacttgaacttatttagacttgatcgaatttataaaaaaaatagcaatatttacaacatcgaattagtttcatcaaatataatattggatatattttaataatatgtttgttttatattgaaatggtactatanttttctattagtcaaacttataaaagtttggcaaataaatcnagtaacctatatataaacagaggagtgcacaaaaaaagtcgattagtgataccgaatctgaactatatatatgctgc

SEQ ID NO: 75646 - DNA, 438 bp, Oryza sativa
  unsure (1)..(438): unsure at all n locations
agcttgctggggctgcctgcgactccaatagtggtccggcggctacgcgaattaagtcggcggaggaacaagcgacagacctactgcacacgagctctgagtctggcggcagtgcgaattgacgctatggcggacgagctttatggccagcggcaccagacaagctcgcaacgagccggcgacggaggagctcgggggctgccggcggtggtagacgagctcatgatggctaggacatttcaccagcgcgcgcgaattcgtgcgatcggtggattgggagtccatcggtcttcccaacatgtggagatcgagaatgacggcgttgggatttccacatatttgggatcttgattggagttctgttggagctaaaatatttcatataacttcaaaattntacgattgggagtagtatttgtgcatcttttgggggcattg

SEQ ID NO: 75647 - DNA, 490 bp, Oryza sativa
  unsure (1)..(490): unsure at all n locations
ntgaactntataaaaggaccagacaaacccaagtacgaatattattntcctgaaagcactaaagcactcccactaatatgattatctgaatcggatttaagataacttaataaaattagtagtactatcacattaattttaaggtttggaggttgcttcaaggtgagatcaaccgcatttctaacttgtaacatgacgagctacgtaatggaagtggttgtgtgatcgactaacgacagaggccaaactaatgcacataattttataattatctagaanacctacaggatgatattagaggtttcttcctagcacgacttcttgtagctagaacttnatggtaatttctcattcttacaaaggtatcacgaggtgtcatattttctatgataaaattggtacctttagatactacatcctccgtttcaggtnnnataaacttttagcactgcccatattcatatagatgttaataagtctaggcaacatc

SEQ ID NO: 75648 - DNA, 358 bp, Oryza sativa
  unsure (1)..(358): unsure at all n locations
agcttctctgtcttgtcttaccaggaacccgtgtttttctacccctgtccggcgttcacaactatatggctatgcgagggatttcactgacaccgactagttacattaccagggggtaccattctcacttgtggttgcactttgattattgttcgatgatgtttccacatgaatcggttcttatttgcgaatacgggacaatgccacatacgcacaacccccgcatcgtgagtnttcataattcattttattttcaaacactccgacaccacatgtcgggttgtgaaggcttcacatacccattctccaagtgttcaacaatcaacagggtatgtgggatatttggtatactcgctca

SEQ ID NO: 75649 - DNA, 455 bp, Oryza sativa
  unsure (1)..(455): unsure at all n locations
gtctgcgagcccttatacctcttttgtatcgctggcatccccagctgaactgtttatctgctttctataaaagcagggccattggccttttctctaaaaaaacttatgataggcagctgaccatggaacagtatgtttgtcatggagattgttggttttttgtttgcagactatagaacaggtgtgttgcttagagagcaacagtggttacatgttttgattgggttctctatcatgtattcttacaattgtgctgtcacacaattcattatcacttttagtgattgtttaaaatgtgagaatccaaagagtggcctatctcttgaaattgttctacctttggtcgatttcttttaccagaatattccagttgcatcatatggacttgatagaggtgaccgctagattttntaatgctcgatgcatatatccttttgcagtagatgctgacacca

SEQ ID NO: 75650 - DNA, 466 bp, Oryza sativa
  unsure (1)..(466): unsure at all n locations
tgatcgggacggagcatattgttntgcccaatggcttatgatatgctatgcgcggnggtcgtcttcactgttggtctttgaattgtgggaacaatgagaatttctgtttatgaaattgtagctgaggttgttctaaacatggctgtgttatgccttatgttctgttagatatcactctcgaaatgaatctgttggtttgaccgagaatcttttagaatgttatgagcaagctgccatttaatcaaaaattcatctcattttcatgcctgatgattatcacagttgtgctgtgtagaattactggatgatttgttgtggttcctcgtgaaactcgatccagtgcttgtccgacctcgacctgtgttaagtgcaagtcttggtttttgcacagccgaagccgaattaagagggatgggagtttttgacaacttattcatgtggtcttaaacgactgaacacgtgaatg

SEQ ID NO: 75651 - DNA, 446 bp, Oryza sativa
  unsure (1)..(446): unsure at all n locations
agcttcagtgtgaanagaaaggatgttttcatggcctctgtgcttgatggngaaactgggtgtcgtgaacgctggcgtgatgatgaaagagaaccaaattcagcccctcggtggaatcgctggagggagacagacaaggaacatggtgatacacgcaaactggaaaggtggtcagatgactcctccaagtactctgtggatggtcgtcgtcctccacaggaacgttggagtgactccggtaacaaggagggaaactatgatcaacgccgtgataacaaatggagtgctcgtaggggccctaatgataaggagtctgagaattggcgtgacagatggggtgattcacgcaaagatggtgatgctgcccgtgaaaaagggttctctcactacatagctcatggaaaagacggcaacagtcatgagaaggatgctgaaagaagatgaat

SEQ ID NO: 75652 - DNA, 457 bp, Oryza sativa
  unsure (1)..(457): unsure at all n locations
tncttcccacaggacgcaggccttggtatcaatctgatccttcttcttgtgcagaatctcatcgctccagccatcggtgtaggaagagtacatcctgagagagctgtaggagtccatcgtgcgagtgcatgcggcgacgaccagaaatggtcccccgtggcagtgaagatgatcgttatggcactccaaaaggccacacatcacggccgccgtccagtactgcgtctcgacggggaagggaaatccatcgatccactgctcctcttcttcttcttcttccaccattggatcccagactacgaatcgctcctcctcgtcggagcaaaccctcacgtataagaggaccaggccgtgtcggctgtcaaccgctgatgcgaggtcgtatatgtcgggactcgccctgaatgttgtcgtcatgtggacgaatcttgcgatctccatttggctttcggggtca

SEQ ID NO: 75653 - DNA, 151 bp, Oryza sativa
cccaaactagtaagctatattagaaccattgatcagctggcatagacaatgctgacaagtacgaagcaccgcggttgaccagataacccgcttacacattgtgtaggggatatatgtatagaataaattcgctttttaaaagaatagatag

SEQ ID NO: 75654 - DNA, 503 bp, Oryza sativa
  unsure (1)..(503): unsure at all n locations
acacaaaatctcagcttgccactgctnagctgaacatttctcatgatgactttcttctggaaggccatgtgccaagttcattaggcaacctttctgttcaacttcaacatctgctcttgggaacaaataaattatcatgagattttccttttggcatagcaaaccttcctggcctaacgatgttaggattggaagataacaaatttaccggcattgttcctgaatggcttggatctctacaaaatatacagggaatagagttggcaaacaactttttcacaggacttattccatcatccctagcaaacatatctatgttggaagaactctttctagaatccaaccagttatatggatatataccctctagtttgggaaaactcaacgttcttagtgtattgagtatgtccaacaatagtctacatggcagcataccagaggagatattcaggaattcaaccataaggaagattagttatctttcaataatttagatgcacccc

SEQ ID NO: 75655 - DNA, 453 bp, Oryza sativa
  unsure (1)..(453): unsure at all n locations
agcttattggttccctcgttgtacgtaggtatgatgtttctcctgtatacgtacgtatcagagtaaggaattagtttctttaaaataaaatacatctaatctaatagcctaaaatatcgggtccaccgatttaagtgaaaatataatctaatggtctaaaatattgggtccaccaatttaagtgaaaatcgacggttagattagatagagccacgtggcggcctaagagcgtttgtaggagtctcacgtggcggcttgagagcgtttataggaagtttaatggacttttagtatatataataatagatagatagatagatagatagattaagcaactaggcgccgagggtccaactggtggtgacacctggccactagaccagacgcactcgcaggtgacctcagatcggcgatcggaggaggaggaganaaatcancagcaattttcacatt

SEQ ID NO: 75656 - DNA, 388 bp, Oryza sativa
tctattggccgacagctctcaatgatgctgtcgacctggtccgccgatgtagagcgtgtcaattccacgccaagcaaattcatcagccgggccatgccctgcagaccataccactttcgtggccatttgctgtctggggactcgatatcctgtgaccgtttatgcgggccccgggcgggtttgagtatctgtatgtcgcgatcaacaagttcactaagtggcccgaggcttatccggtcgtcaagatcgattagcactccgcacttaaattcattaagggcatcacggcccggtttggagtgcctaaccgtattattacggattatggcacccaattcactagtgaactcttcggcgactgctgcgaagacatgggcatcaagctctg

SEQ ID NO: 75657 - DNA, 432 bp, Oryza sativa
agcttaaactcatatggagcaaccagcttctgtcgtgtatgtgcgtccaacccctcacgtgacaatggcattggcatgaccaacggttgtcccgacccagccgatgaggccgacccaaccacctcaaacttcaacggaagtagctttgatgcttcaggcgcaattacaagcgtttctctagcaactgaatcaaccccacacaatttcaagagcaatccgttcgtcccaagccatcgagggggtcaagccaaggcgcagtaggttggcacccatcaagtcagtttgacctacgtatgccgactcaagcgcctctggcaaaccagcaaggggcaatggtcagatttagcggggcgccacaagcaaacctataagcccaaggctcagtggtttggcagccgacaggtcaattcaacccgcgcatgccagcccaaa

SEQ ID NO: 75658 - DNA, 370 bp, Oryza sativa
tctagattctattcttggctatgcacatacagattttaaattataagaaaagaataccaaaatactccatagtgtatatgaagagaatacgtcgacaaaagtatacaccaatgagtaatgtttacctctagatttggaagagcagacgatatttgtgtccaatttgaatggctcccgtgtgttaaacacataccaccttctcctgatgcgcatttcacctgcatatccactgatttgttggatatggctgatcttgtcccagtcagagcaagatgcccccattgatatgtaccaagcagtggtaaactacagtccagcaccaaactttctggtcttacaacttgttgatatcctgggtagtgtttcatgc

SEQ ID NO: 75659 - DNA, 419 bp, Oryza sativa
  unsure (1)..(419): unsure at all n locations
agcttcgntattgtggtgtccatcatcaaacaccgtattttctggatgtacagtaacaaatgctgccttttaattattctatctattnttttgnctctatctctgaagactaatttaggtataatgttgctgtttagatataccaacagcaccattttataaacctcttccacgtggtggaattgtggctgagcttttgaatagaactgatgtcaaccaactattttctacagaggaatatgacaaggtattaatttttaatcattagtcatgttgctattataatgcagtttagacaatattaaattttgtattgctgttctttgaaatgccaggtagagaaagcactgcagggtgtttttggtgaaaccacccatcgaacagacaaaaccataagatacaagattaaagggctttct

SEQ ID NO: 75660 - DNA, 420 bp, Oryza sativa
  unsure (1)..(420): unsure at all n locations
agctnngggctgctgngccaatattgaagaatcacaagtagtacaagccccgcctacagcttggagctccccgtgctcctaggacggcgccctcctctcatcctagagctagctcatgctctgcaccttcgcctcctcatgggtatgatccaaatgccttctttcatcctcagtatgcctattttgggatgcaacccaacgagtacttcaacccggtacttggggctattaataccctaagtgaaagcattcaacgcttgtctaccgggcatgacgctttgcatgaggatgttcgtggcttgcgcacggacgttggagacttgaatgcttccgtggngagattgcacactcgagtgggtacattggactctcgagtccaaatggtggagagcttccaagcattcgtgtataatcggcatc

SEQ ID NO: 75661 - DNA, 429 bp, Oryza sativa
  unsure (1)..(429): unsure at all n locations
agcttagaatcccatgcgcatgcttaccatgttcgagccanagaactcagaactgaagaatgagcttgcaacagcaagacatgaattgtgtgcagtctttacggggagtttagatccagggacttaactttagtccctgtctttagacactaagttagagtattaaatatagactacttacaaaacttattacataaataaaagttaattcacgagacaagaattntaagcctaattaatctatattagagaaagttattgagcatcacataggcttatcatggataattaggctcataaattcgtctcggagatattccaagatatggatgaggttattaatagctacgctaatatttatattaatttcaacatcggaggataggactaaaggttagtgcatgtatacagggcacttaatttacttac

SEQ ID NO: 75662 - DNA, 450 bp, Oryza sativa
  unsure (1)..(450): unsure at all n locations
cgcatttttttccccaagccccagccaaacaaaagcaaaccgtgcgttgttgggggagctggtttccaactcataggaaccttgagccacaaatatttctccatgcccttcaaaacctcaaacaaaggctggcatgctaactggttctatgttcataatcctgagcccgcactccccgagatctgtagnctttcttcggcttaccacgacacatggaactcactgctcataggagatgaagctgcacaagcagtagaactgatggagaggatgattaagctgaaagaacagggtccttcatgggaacagatcaccctgcactttatcaagtgtccgttagtctccatcaaagaaagatctcgcacagcctctgaatattacggcaagcatgacccaaatcgagaagatccagaatctcttgacttcaaggtcatgaaagaaaagatgtat

SEQ ID NO: 75663 - DNA, 447 bp, Oryza sativa
  unsure (1)..(447): unsure at all n locations
ccaccattcttctttctatcttgtctgaagaacgcaataccaattagtaactgaagattccacatgagccatgccattgcaacctgcttcgcatggctattttgcagcccaaatcaacacacatttaccagattgttctaatgggatgggaagtggttcttatctgaaccaaagtgtcggcattacacttgctagactttntcagccccagcacatatcctacttcaaaaagagaaganaaaaagagacttaagaatttaagaattaaggacattcgaaagagcacnagacaaagcatatgcactatattgcatgtatatatattttttgaaaagcaaagatctcacacaaaggcgtgagaacaaggcgtacaaacagtcacatgttctttctcataggcttctcttgcgtttccttgctcaaaaagtaatgggtccacttattggt

SEQ ID NO: 75664 - DNA, 444 bp, Oryza sativa
  unsure (1)..(444): unsure at all n locations
tattctcacttaaatgtaacgacatanaatgtacaagttggtatattatgaaaagaacaagggaaaaattatagtaccttgaaagaacagcacaaaatagcgtcttcgtaatcccatagcattttcaatagtgcttccccagcatcatctgcctgcctaagtaactccacccccaaatggaacctgcaaacaccacaaatccttatcagcttgaatacaagttaatatttggtaatagtcctatatttttaattttggacaggtagtggtatagccgtatagagcaataatgcagctcctatctattaataccaaaaggcattcataagatatataggaaataaacatgtacttactggtagctntggcaaatccaacgagctagcgttggggcttcagggaagcctganattatcttctgcccagcattcaagccagaccgag

SEQ ID NO: 75665 - DNA, 364 bp, Oryza sativa
  unsure (1)..(364): unsure at all n locations
aagctgagctcccggcggcatggcgatcaaaaggcggcgcggtggagctgatctnatactgaancggngctcgagccttgggcggcggcagcaagatcaccaacacgttcatnagtgggatgaggacgatgatgcgtccngcttgccgttcgacgtgcctatgggccacatttcggtgtacgtctgcgagcggtgtactntagtactatcatcctttgccactagcacctacattctctctattatttttttgttcatttctaatcatcttatactatgattttcacaagtatccttctttatatataatacttctctctatactttttcctatcttctatgtctttcgtttttatgcattttt

SEQ ID NO: 75666 - DNA, 463 bp, Oryza sativa
  unsure (1)..(463): unsure at all n locations
atgagttcaaacgtgtgattgcatctttacttggccatgatgactaaatacgtgtagtgctgaataaggcaaaccaagatgacactcagcaggtcgaggtcttacttgcaatcaatacgggaagtgttacaccatattctgttataaaatgtgctatcatgagcatcagaatcacataatgcccttattcatgctgcatcttatgagagtgtatggtgcactgatgtggtctcttgggaaagttctcaatacccctgaggtcgcgcgtgtttatatctgggtaatacctacatcttcaattatctaacaccccatcttttgcttctgtntatagtgctgtcgcaatcttgattctggagactgactgactgactgactcgatgttgtataatttctgtataatcatgacacgttgacttagaatattttacaagttaatacatcgctagaactgactgtttat

SEQ ID NO: 75667 - DNA, 420 bp, Oryza sativa
  unsure (1)..(420): unsure at all n locations
accatccgccttcaagacacattcctgcacggcttgcctgcgatagataccacgcctgctcctatcaacacacattatttcataccgatgcacttgtgtgccntgagcaacaactctatgtctccgtgcctttnntgatttatcttccatgtancttgtcactacgttgccaaacactatgttgttatcggccatggacgggaccaattttttgtatcgatccctaaagtaggcttgcatgccgtgaaggatgaattcaacaatagcaaccaatggaagtacccgaacttctcgcattacccagttgtacacctctgccaaaatggttgtcattatgccataccgagatccatcggtgtcgaacaatagaacccacttcttcttaggctcattctcaatccactgagagaaatatctgat

SEQ ID NO: 75668 - DNA, 476 bp, Oryza sativa
  unsure (1)..(476): unsure at all n locations
taatatattaatgtgagggacgaatataacatgagaagcaggattaatgagtttaaacaaagcaatatagttatatcaggtaagatcggctgaaaccccgattctacccctattggcaattaagaagcaggttagtttttatgattctaaacacgacttagtaggtcaaactcaattgacgtagcactaagtatggaaagaagcataaaatctgaacaatcaagcttttgactgattntcgggatggcggataccttagctaatctaaactagcaaaatgatttagccgataccggcaaaaccctagaaaaggctnggctgatgcaagtaaatcgagccatcaagttagaataatgaagatatatgataatcaacagctacgaaagatagattaagacatctaanatgacatactaatccgctgatgcatactggctgcgacagtcgtacctctcatctgaagatcgaagccgatg

SEQ ID NO: 75669 - DNA, 171 bp, Oryza sativa
  unsure (1)..(171): unsure at all n locations
acttttcaaccgtgttgtccggtttggtacaatttgagcagaagttcgggtttttctcccacctcttgtgcttgtcttgcagagcttgctgaaactgatgagctggaaatcttagtgaactcngagtacggttgaggctgtgctgctcactattgttgtgactgtcactat

SEQ ID NO: 75670 - DNA, 242 bp, Oryza sativa
acgcaccttgtgcccagcctagaacaatttgggggtggtgaaaagagggtgatgagtgtgtccaactctaacttaatccaagcttactatactgttctattgatacgacaattcccaatgactatatgtttaacaccaccgatagttgcctagttaaccaacgaaggctctacctaagtgaatactaatggaaccatcgatagagtaaccacctagtgggaatttattatcctacggtgaac

SEQ ID NO: 75671 - DNA, 453 bp, Oryza sativa
  unsure (1)..(453): unsure at all n locations
actcagttgtggactccctgttggtatttattatggctacagaataatctgtaagcgcatagatatcgttctagtcttcagccaaaagtgttctaaggtattgtatccatagggaacgtgtgtgtataatctaagaacggcattcatccaaggacaacaactaaatggtagaccgaggatagagaggatttccacgggttaattttcttaattaaggtaggtaaaactctatcaattgttttgtgcaccggcttacccctaattngccaaggagactccggcctatagctctatgatgtaaccgaacgtggaggattacaaangatggacaaggctgtcaccactttgcgtgcatacctctacaacccgtggagcacacaacatacaanaggtacatccagcctagacatcatgtctatgctactaattactaccctaatcccgatgtcacat

SEQ ID NO: 75672 - DNA, 264 bp, Oryza sativa
tctatgctgcctactggatgaacccaactttgtataactggagcactctctcctgaatgaagcaaactttgtataatttgatcacttcttgtttcgatgtaatacacactaatgggcttctaacttgtcaacgttggattaatgaatcatgaattaatttaccaaaatgtgcgcatggcatagaaggtcatgtctattgtagaatgatcaacagcgtacatagcatatgtgatgagctgtatcgaaattcctatctgttctctg

SEQ ID NO: 75673 - DNA, 419 bp, Oryza sativa
  unsure (1)..(419): unsure at all n locations
gatgcatatgaatattgcgtttctgatgcaagcctacattnggntattctgnttggacctgattggttgcagcaaagtcacttaccacttcactgatgaacctgctgacatgcatatgctaagttcacaactgaagtagttgaatatctgtggagatagcttttatcctttgttcatttctgcctaatacaatttagaccatgttngaattatttccctgagtatttgtgttagtggctttctagtgacaatacaaaagcattctaaaactaatgaattttcaacaggtattactctatgtatgggcatgtcgccaaactagctgaggagatcaagaaaggtgcttcatctgtcgatgcgtggaagttaaatatggaggtcagttcaactctaagtgtaacttctttttgactgacaat

SEQ ID NO: 75674 - DNA, 438 bp, Oryza sativa
  unsure (1)..(438): unsure at all n locations
ctaagcttacaaaacagcataacgcntttctgtcgggcaccttttaatttgcattgcaataattccaaagaaatatatgaccgcataaaanagatttattagcattgggcaacactattgtgcgcataatatngccaaagcaaaatatgcctaagtccctaaggaacacaatgggccacgctgttaaaagtattgngctgaagtactgttcangcctatgcccatttgcacctccgatacccttaacaagaaatccgagatccaagcgacgcttcgtcttccccgccggaacgctcgccattttcctcactcccgctacagtaaagagctgcgccggcgaactatggttcaccaatccacccaaatccaccttcaaaacgtgatcaaaatccttcccgtgatccaaccgctcaattctcacctcttccaagccatccc

SEQ ID NO: 75675 - DNA, 370 bp, Oryza sativa
  unsure (1)..(370): unsure at all n locations
agcttttaaccgataattgtgcaaatctttctaattaacttatcaactatcttatttaatctaccatctactaataagtatactgctatgatacgttcacttaatcttggagcctcctatgctatttttggaacagggtactattatttttctaaccaataattcttttgtaaaatactgaacaattattttagccttttagtcatatcaaagtaacttaaaaatcgcagntgtctccttccttcctcttgcacggagggtttgtgcttcgtcatgtgtgcgtaaccaccgtacaatccgtactttctcctcaatccacccacctagtcgatcctcaattacattggcctagctcatacggtatcctcaa

SEQ ID NO: 75676 - DNA, 433 bp, Oryza sativa
  unsure (1)..(433): unsure at all n locations
tgaacaattaactattctatgcaggttgggtcatttatttttatttaaaggacaacaagatgaaggtacgatgagccttggctacttctgctactatgccatgcatgttnttcttgtataattacacagtacaacgcaaacactcacaacgcacgcacactcacccctataaactcatgcacgtgaaccctacccttatgagcatcattcaagactgggccggcaaatcttgtagattgacgaagtcaccacagacgcctcactgtcgacgggtacgtcgcctaccagtgaaagcataatgccgttaaactcctgaaaattctgttcccatggcgagtcgaacttatgatctattgtgctacttacgctcttataaccactggctacatacttcttttgctatgccatgcatgctgataaatcatggctctaa

SEQ ID NO: 75677 - DNA, 263 bp, Oryza sativa
agagaatcatattcttctgtgtatccacctgatttaatctgaagggatgatgctagagatgaaattgttattaagatactcacagctgcagaacatcatgatatttttgtgctttctctgcttgggcttggacgcattgggaaaactgaactacctaatattgtgtatcatgatcaacaaatcctggagaggttcaaccagacgatgtgggcctgtgtctctcatcaattccatctgaaaaatatacttcaagatattatcta

SEQ ID NO: 75678 - DNA, 359 bp, Oryza sativa
  unsure (1)..(359): unsure at all n locations
aacagctaaggatgtattcatagagagagagagatcagatcatggaccagntattgatatatatgagctagaatcttaggcaagatataacttgcaccgttgctccgatccttcatcacagatgaccatatatgaattccatggaagctcactgaattctacttgacagagatatcgacattgatcttcctgcggacactctccttgaccttgccaatggtgagcttcagctcgccggaggtgagctntgcctggacaccctctctactgtaccccgccgggaggagcagccgcgcgtagatcccgcccgcgctgaactcgtcggcggggcctnctgatgatctgcaatggcaccggaa

SEQ ID NO: 75679 - DNA, 371 bp, Oryza sativa
cacttgtcccacgcacggaaaacagaacagtccattaaggtgggattatttaagtattagcaatctatttttttcaaaaatagattaatttgattttttaaagcaactttcatatagaaattattttttaaaaaacgcatttgttagcagtttgaaaaatgtgcgcgcggaaaacgagatatgtagttgggaacctgtgagaaagaactcagctataatatccagaaatcaacatctgattctcacatgttatggattagctgcttaattcttagccagatcctggtcatgagacccagcctagctaattatgcacgaatacattcatatgcatcattacgactatacacattggtctatgaatatgtcta

SEQ ID NO: 75680 - DNA, 363 bp, Oryza sativa
  unsure (1)..(363): unsure at all n locations
gacactttatactaagcttaagacaacccanataagaatctcaattcactcttttgtttttttctacccgcatgctaagccttctctgctgtaataattaattaatggcagctttccggctaagggtaacaccaatgtatataacaaaagtaatccatatagatgggacccacatatatagactataactaatgttatcttcacaatgtatatggatagcaactagtattangaggagagagaaaatagagacaaataatatattttattctatatgggcagcccatatgcttatgggtggctttngctattttcttgctatggactagttacacaatgtggttaggtggctgaatggaatat

SEQ ID NO: 75681 - DNA, 395 bp, Oryza sativa
tcatttcgggtaaactctatttggtaatcaattgatgcattgtcatacttgccagcagctttattagcttctgcttcttcaaatacatcaaagcgtttgtagtgccgagagatagcaaaagtagcattcttcctccacaaaaacctaatagccatgatatgacacagtcagactcaacacagtagtcaaatattgcaatattgcgatcttaaaataatgaaaagctggtaagttccaaattctaatgtcagcagaccaacaaggaaatacaaacaaaatactaagaaattgagtgagtagctgttataaataaagtgtcttgtgaaaaagccattgataatctttctagtctaatatcctcaacagaactaaatatgcagtaaatccgtgataga

SEQ ID NO: 75682 - DNA, 323 bp, Oryza sativa
  unsure (1)..(323): unsure at all n locations
atgttgacagggtctgcgcgcttgtgacatctgagatccagagcctaacatcgaatggaccgttccataatgtggaggctgcccatggtacacattgatgcatacgataacacagaactgcctgataccgtgaatactttaaccganatgcagtagatgatcatcatgtatagaggacattgtgacataatgtatggtatatttcttctggtcaagagaattcaacctatacttgccaatgtggcagtccgaagcataccaaacgagaacatgaactacatgacctcatggcagaccgactacattgagactatatacttgca

SEQ ID NO: 75683 - DNA, 381 bp, Oryza sativa
cagaaaacatacttctggtaatcttgcaggctctaatgctgtggcataatgagcattcgcatcaacaggtgaacccacccacaagcaataatcttcaattatgttatgcgcacgacccacccttcttttgttagcctttatcacctacaagatgtggaagcatatgatctcatataatcaataaatgttgtactattatgtcatcaacatacactactcaaaatactcggaacacctaatgtactaacctcctctgagccaagactggatagtgaatgcataggagtctctataataacttccgttgattctgcacgtgagacccatttctcaactccatcaacagcgaagcagaaaggacttggatcatcgtgagcatat

SEQ ID NO: 75684 - DNA, 485 bp, Oryza sativa
  unsure (1)..(485): unsure at all n locations
gtcgagaagctgcaagacgtgcttatggaagaatatcaagctcatcagagagtgagaatgtgctaacgctcatcatggaggattgggagtctgcttaatctgtggccaaaaatagtgtgacaagaggggtaactaaagaaattccagctggttcatgggatgatatatgagggttgaaagcctgtaaagtaaaatatgcctcattttatgaattctttaatcaaacctcctttaatggttattgttgctatgcttcagaaaaaacttcagcaagctgttgaatggcccatcaagcatgctgcttcatttgatagacttggaatatcacctatccgcggggtgctattgcatggccaccaaggtgctcaaagactacccttgctaaggctgctgctcatgcttgccaagcttctttcttttattaanggttgctgcgtaaaaatgtctctcttttctcattcatcttccacatcaaaagaagctgt

SEQ ID NO: 75685 - DNA, 456 bp, Oryza sativa
  unsure (1)..(456): unsure at all n locations
gcttaagtaatgagaaaagacgggtattgagttgcatgcattgattagtctaactaanaacttaagctgatgaacaaatntacttatactccaactctttcttctttgttaccattccgattatggataccgaattattgcatgcatgtttctgaagcttggaaaaggtgcctttttttaaaaaacaattcttcatcagtatctggtggaaaacattataaaacaaacttttcaactctaatattgaatttatttatttgtgctcttaaacaattggcacaaactcaacttaatccatcattcatttgtatcaacactctaaacatgtccaaaggcaattttttttatgaatgtagtggaaaaagaatacgtgtcatatatatactcatttactcccattntaaaatttttcataatgcaactctgatnccataattgacatgacctcaacagtta

SEQ ID NO: 75686 - DNA, 447 bp, Oryza sativa
  unsure (1)..(447): unsure at all n locations
gctagtctctctgcttacatgcgtccatcagccactgcatcaagcttttgtattggatactgcattcctatttcctccattttgatattccttataattttcatgtgtattcgagaactaatgcttggttccattttattaatggccccgcttgattattccaaaaagaaatatacgttgtgttcttagggggttctataatacaataatgcactactacctccgtcccataaaaattgaatttctagggaattaaggacatattacaaggatagacaaatgactacaataacctatttaatgaacaccagacatgtacacattccatatataaacttgattaanaggaatgtcaaaacaatgggttagaggagatggaacgaaagaagattacaatgaaatgtaatcaatatactgcgtcccacattagtagagatacaaatttta

SEQ ID NO: 75687 - DNA, 499 bp, Oryza sativa
  unsure (1)..(499): unsure at all n locations
gctgctctgacgatccagntaagntagtaccttgcatgattgaacatgctccattgctaacacatcaacgaacataaggtgaaggtgtctatctataacctttctgtcccttgagctcaacaacacccttgacctcaacaatatgaaaaatctgtgcatcgtttgcatgggatgaatgatatctaaaagtctacattaaccaacagcctcctgcacaagaatggagatgactgaatatcttgatcaagtaatattccatcttgctctaattaataatggctatatcgagagaaataaaatgatttggaagcttaagataccgcttaagattaagatcttcatgtggtacttacttaaagggggtgtgttaaccacagacaatttatcaagacagaattagaatggtagtttaagatgtggtttttatatgaaaaatgagaatattcaaccatctttcatggattggcattatgcaaggttatatggagagcatacaata

SEQ ID NO: 75688 - DNA, 393 bp, Oryza sativa
tattatttgattgatcctaaatgcgtctaacaacagaacctctgatatgtaaccgcgctatttagatatatgcatacgtagccataatccttccatagctatttgatagactaaaccaccgattagccaaatatatatgtatcccataaatgctatgttggttaactcctaaataggccacgatgactatagaaagattaagaaactttagccttagcatgattgggatccattagcaaacacgaatagtacatgttgttgcgcatatttgattggtgattgaatattggtatttctcgcgtattatagaccttgtgtatcggttatgcgtgaggcaacgtctgcaactttcacgaggtcgaagttgatcaagattatatcaataataaggat

SEQ ID NO: 75689 - DNA, 429 bp, Oryza sativa
  unsure (1)..(429): unsure at all n locations
tctaagcttgcgagtctttatcactaaccgtagtgatcttatttcatgtggagaattccatacttgtgctgtgactaccttcggtgatctattcaattggggggatggttcttacaatgtcngactgcttgggtgtggcactgaagttagctactggcttccaaagaaagtctcatggcccttagaaggtcttcaagttctatctgttgcatgtggctcatggcattctgctttgaccacatcaagtggaaaactttacacatttggtgatggaacatttggtgttcttggacattgtgaccgcgaaactttagcatacccaaaagaagtagaagccttgagtggattcaaaacgatcaaagttgcatgtggaacttggcattctgcagcaatgtggaggtactaatcagacacgtgccatgtgatgtc

SEQ ID NO: 75690 - DNA, 488 bp, Oryza sativa
  unsure (1)..(488): unsure at all n locations
cttaagcgactgcagctgcagcttggcaacttagtgtgtctcaacttgaagatgttagaactcacgaggaggcatgtggggcanaactgagagacatacaacacttagaaaagctacatttgtcctggaaggatgcatggaatggatatgacagtgacgaaagctatgaagatgaataccgcagtgatatgaatatagaaacagaaggggaggaactgtcagttggtgatgccaatggtgcccaaagcttacaacatcacagtaatataagctctgaacttgcttcaagtgaggtgctcgaaggtcttgaaccacatcacggcctcaagtatctacggatatctgggtataatggatctacctccccaacttggcttncttcttcacttacctgtctgcaaacacttcatctagaagaatgtggaaaatggcaaatacttcctttagaaaggctatggttactttgtaaagctcgtgttgatcaaaat

SEQ ID NO: 75691 - DNA, 396 bp, Oryza sativa
  unsure (1)..(396): unsure at all n locations
acttactcttgatgccaaatactcacaattgagctaactgcaacanggatgtgaggcttgtattgctgcatgcagttgtgctagaagagacattatgtgtgtggaagaagcagagaacataatacaggcgatcaaatctggtagagcacaagatattgaattcagatatgagccaccggcacaatcagaagacatattntccatttnttgaagagctgcgtccaagtgaagagcctgtcataaaggagattgagccatgctacaagaacaactcttgtatgtgcgaatcagaaattcaagaggctagcccaatgactgatatatttctgtgaaagccaaccaacgtgtactcaagtaaaagccctcataatgagagtgacactgaagatggcagca

SEQ ID NO: 75692 - DNA, 370 bp, Oryza sativa
ccttctctcaaatcaccagtaccgcgagatgaatgccgagttctatggtactgaagagactgattctgctccaaaacctacatttggagaaaacgtgtgtgcaatgaccgagaacattgtttgcgagtatggaaaaatgacttagaaaccatctaaggggacaaagcgcaagagacccgagatgaatacgaagggaggggatagtaagaagcaagatgatagttcgaagccagatgataaactccctcctccattcaagaagcattccatatgttttaagtacctcccgtactggaaagagctggtggttctgcatgccatagacgtcatgcatctagagaagaatgtgctcgactacatcactggaaca

SEQ ID NO: 75693 - DNA, 351 bp, Oryza sativa
  unsure (1)..(351): unsure at all n locations
aatggtgcgtgcagcaacgagggtttcgcatattccataatggatggtcttcagccattggctgccttcctcttaagatacgcagcggtgcagaattcctgaanggcttttcttggataactcagcttcatgcctaacatacagtttgctcccgctttgaatccgctcggcttcatcttttgcttgagggagttcttgagaagtcaaaaatcgtatgaggggctctcgccagtcggcttcaaccatagccacgtcatgagtgcccgcaacttgagtagtatctttgtgaggtactgtcggcgcataaaggtgttcgacgaanacatcagagggcgccatctcgcgcttgga

SEQ ID NO: 75694 - DNA, 290 bp, Oryza sativa
gattatcagactactaattttctattcaaacatcgtcgtcgatgtatataggatgagctatgggatatataaacaactagggttcaaggattactctcccaaatcatgctcatatgtagtatcaaagctttattagattcaaaatcatataattgagtgccaacaaagcccatgcataacagcactgaataaatactcgcgtgaactctatcttaaattggcaaatatgtccaaaattgactatgtgtgcgcaacagtcaaggtcaagaattagatgacttatgttatgc

SEQ ID NO: 75695 - DNA, 463 bp, Oryza sativa
  unsure (1)..(463): unsure at all n locations
tgcagcttccggcggctttatgggcttcttcaacccaagaattaggagtcatggcgcagctatggttggggaggggcggaaatggatgccctagatctggctatccgtgaatattattcgatagctctctggctctcttttctactcccttcatcccaaaatataagcatttttagcacattggcaggtcaaatatttttaactttgaccattaatagaaaaaaattaaaaaagatcaatcatgtaattgatgttactagatttatcattaaacaaactatcataatatgcaactattttaatttaaacatcttatttgtatagatattgttagtcaaagtagcatatcgaagaccgcgccagggtctaaaaatgcttatatnttgngatagagggagtagctntnttatgcatgttgatctgctaaaatagaagtaaatgcgcccgtggacaaaaacttatg

SEQ ID NO: 75696 - DNA, 383 bp, Oryza sativa
  unsure (1)..(383): unsure at all n locations
tgtggactatggagtttggtttaggtgatgcaaactgatcccgtagaacttcaatatcccctggaagaatcttgaggttggaagagaaaatccgccataaaagaaatgggagaataccaccacctcgtgtgtgtcaagggtcgaaaacatttcaccatatgctggacgccacatgatgatctcttttgccggaaagactccgtgcgctaccatctccttcaagttctcctccgttacatcggagggtgcccactagctttcgaagctntctctttcttctgncatggatgcgaactggatggtatgagttgatccggaatgtggctgagaatgaataggagaatgatgcataagtcgtgtggaggatttctgtggaaattttg

SEQ ID NO: 75697 - DNA, 447 bp, Oryza sativa
tcatgctatacaagtttgatctcgctggtagttctggtggcaaccgatattcttcgatgaaaaaaatgactctacttatggaagaattacaaatctggccccaagacatacctttatccaaggaagattaccatatcatcaggcgatatctggttgaatgtgatggtagattgctgttggtcaggcgtaggatgcaaatacgcccatttgcaaaatgtgatgatctcttggagactgcatgcacttgctggtttgatgtctttgaggcagacttcactgtgcaaccttgtcagtggagaaggctcaacacattgggccgcagagcgcttttcattggcaaatattgctctaagtctgtctcttcagaagaatgtgaggaagtcaaagaggacagcatctatttcatgtgtgactatgtgaagtcagatcaatctgttgatcctcttc

SEQ ID NO: 75698 - DNA, 390 bp, Oryza sativa
ctttaactaactttggtctggtcttgccgagcattgaagccacctctagaagatacgggctatagagcggatgcgccccccaacaaacttatggatgtgcaatgcgtcaccggttgcatggccgccctaagtcggttcatatcgaggctgggagagaaggcgttacccttatttaagcttctcaaacgcttcggaccgtttacctggacggaggaagctgaaagtgccctcactcagttgaaggcgtatctaagctctcccccagttctggtcgccccggagccagacgagcccttgctactctacttagcggtgaccccgcaagtagttagtgcggcattggttgtggagcgcgatgagggcaattctcatttcgcgctttcccaccct

SEQ ID NO: 75699 - DNA, 100 bp, Oryza sativa
  unsure (1)..(100): unsure at all n locations
ctgagctgcagcttacagctaagtaggaaactcaacctctatatgattaatgatactgtcatatngatatatgcaacattcaagcactgtgaattgtatt

SEQ ID NO: 75700 - DNA, 158 bp, Oryza sativa
tgaaactacttggacatttaagtacaggtgatcttatcataatatcatattacttgtctagcagaggtgtgtgcagcaccagatcaagttctaatattatgtaatgtggtacagtgttagagagttggtatatctgcctattactccctccgcttttt

SEQ ID NO: 75701 - DNA, 454 bp, Oryza sativa
  unsure (1)..(454): unsure at all n locations
ttctatagctacatattctcataatctatatgacaatctgagcgcgttgggacaacctntgattctgaaaaaaactacagaggctagaaactctccaaattcaccccaaactgggtcagtagccagctctagtgcctctacagctcgatcagcaatccgtttcagggttcagacttcatagtacgaccgattgtagtgtccaatgccgcaccaaatatcggacgtatgtacgtactctctccatcctaaaataagtcaacctcgtactattaccatgaatatggatatgtattcgattatgatatgccatattctacgacgggattggtttattttanaatagaagaaatacgattggttctttctaatgcttgtttggcatggcccaagggcaagcactgaaccaacttgcccgagagagcgaggcagcgctaatcaacgtgacactgaacaa

SEQ ID NO: 75702 - DNA, 353 bp, Oryza sativa
acgaagcgatgggttcatgcttcgtacgactccgtcttcttctactaaggcgatgccgaaaagcatgacggcgaggatgaatgagacgatgaagaagacgtggaggtcttggccgaaaaggccgcgaacgtggcgatcgaagaccgcgtcgacacccctggctacactcctactccaagtccaggtcacaacgagaccggtgtggagtcaaacagctttccccttcgacgaaaggatttggaaagggcgaaagccctagttgctgtctcgtcgggcaaggtggcgaagggaggtccggtcaagaatatctctataactaaaggactcgtcgacatcgctcgcgtgttcagcga

SEQ ID NO: 75703 - DNA, 478 bp, Oryza sativa
  unsure (1)..(478): unsure at all n locations
gcttgcgcttaattctacttgagagggcatgacatggcctttaggtaatctaattcgtttctcttgcacaagataaaaaaaaatcatatcacatttggccacgtcaaaactatacttaaccttactttgccgatctttacgaggagtcggcattaaattagagcaaacaaaaggcttatntttgttagttcatgatcactccgcaacatacatatcatgatcaccctcatcatcactatcactagcttcaggataatcaatcaaattaacattaggctctaacaaatattttgctatccttaacccggctttcctgagccagagccttttgcatgagttgactaacataaaaaaattgttggcaatctaatctttctctaataggagcaattaaaccattacaagccagatcagccaaatctctatcacgtatattcaggctataacatcggtgtctaacatctgtaaatctcttaac

SEQ ID NO: 75704 - DNA, 197 bp, Oryza sativa
actgatgcagccttagtttaaaagaaagaccaattctagacaatcaagcccgtgggagcttcatagagtaatagactatctatataattaaagccaacggtgggtattaacctaatcgactgctgtctaatgatagatattatccaacttagacgttagataaccagtattgtctaagaatatttatgatatatgat

SEQ ID NO: 75705 - DNA, 395 bp, Oryza sativa
  unsure (1)..(395): unsure at all n locations
tagctatttgaattcgcgattaatcacgaaacgtgctacttctaatgttatgattgctaaaacgaaaatctgtgaaaaggaacccattgtatgggaaatacttcaagaagttatgaggggacattctgtactgttgaatagagcacctaccctgcatagattatgcatacaggctntccaacccactttagtagaggggcgtactacttgtttacacccattattgtgtaaaggtttcaatgcagactttgatggggatcaaatggctggtcatctacctttatccttggaagctcaggcggaagctcgcttacttatgttttctcatatgaatctcctatctcccgctattggggatcctatttgcgtaccaacccaagacatgcttatcggac

SEQ ID NO: 75706 - DNA, 360 bp, Oryza sativa
  unsure (1)..(360): unsure at all n locations
agtcttacgaatcttcgagaatatcccgcgattgtattacagatncgatataccgcaactatgctgccgacatgtcgctatactctatatctaatgactcaaaagaacagatgcgtatttagactctactatattagagccattaagatagcgtctcaagttttacgtgaattacctgtgaagtggaacaggaggcgaatcggagctactggatcgagggatatgaattatggaggtctaaatggattgtctggacaaggaaaaggaattattaatttccttgtaaaagataaggaaggagggatcggatttagacttcctcgggcgaattaggcgcggcccgagggattcacaatgctt

SEQ ID NO: 75707 - DNA, 333 bp, Oryza sativa
ctacgaggggaaatgacaaatgtttttccgtctacagtacacgcgagctattagcaagggtcaagggaatataaggtagtttcgaaacacattaaaggattattgccaacctttaaagacatctaagctcacagatattaacaagcggaccctacaattgctaaccaagctacagatcaacgactgcaccacctggtccactctccagcaaccagcaacatcaatttattgtagcaattaaaaaaacatactggacatgtcgttgccaacgagggcgtttcataatatcttataaggtcatttacccaaacattctacgtacctcccatcacc

SEQ ID NO: 75708 - DNA, 420 bp, Oryza sativa
agcttgggcgataagcatattacgaagagagcggtacgtttctgcacatccatgtatgctgatgacgcgactgtcttcataaacccgaataaagaagatgtgtgagctttcactgatctccttggtcgctttggacatcaagtatcataatattgcctactaaatacgtgcaacatccaccgcggctaggatagccctgttccccccatatatagaagataaatgatccctcacagcgatgcattacccttgaagaacagacataagaaagaactgaaacgaagagattattatgagatgaattcatggggacaggatgtcacgcccataaattcacaaaccagaatttctaagctgaatgtgcattaaacccctgttcatgaccagccagagtacacaaacgacaattggtgacataca

SEQ ID NO: 75709 - DNA, 379 bp, Oryza sativa
  unsure (1)..(379): unsure at all n locations
ctctacagtgactcctcaagctcctgcgccgacttcttctaagctcctcgtncggcaccttccaagtcaaggtcccaccaagcttcaccgccttgccgcacaaaggcaacgaagaaagcgaaagttgacgccgccggaaacaagcagccggcgtacgaatgcacgccagaggagcttgaatcttatgtggcagcagaagtcaagaggtaattgaagcctcaaattacagaaaagaagattcctatagaccctagtgtcagaaacttcttcaggggtatgtctgcacctgccaaggaggccataaagctatcggactatgatcgaacacttaaaaaagcatattctgcanagtccaaaccagtccctcatcttggagagc

SEQ ID NO: 75710 - DNA, 336 bp, Oryza sativa
  unsure (1)..(336): unsure at all n locations
aatataaggcatagtcacccttaactcagaaccaacaaataattattacctcatagtttggattatcctaataaataaaatgcatgcacccaataaaattagatatgttgattgtggaggatttaaataataatattntaatggaaaagataggttagttaatgatatgtatacatgcacgtcttatattatattatagaacaattttaaaactaaagtagttgtagcctcagtgtgttcaaaaagaaaaaaaaaaacgtatactcagtgttgcggcgcgcgggaccgggctggagtagctttgaatgaggatgatcatattattcatgtcgatct

SEQ ID NO: 75711 - DNA, 402 bp, Oryza sativa
  unsure (1)..(402): unsure at all n locations
atgtgatcaccactatgatgaatcacaatgcattcttcctatgtgcaatgaccacatctcaacacggtgactangagctgcatgaaaaccggttggcggggaaaaacgaacagtgaatttaacaattcactaggtcttacgttttcaccaacagggcccaaagcattcaaaatacaaagaanaaaacaccttgcttttaatttaataatcaatgtttcttaacaaactangtgtagctcctttttagatgatgacgaagattatagataattgcttatacatattaattaaatacgatatgtatatagcgtagagaaattatcaaaatgatgccaacgaagaatatttgttgaggaaatgtcctcccanacatggcagaggctatctaataaatatgatatg

SEQ ID NO: 75712 - DNA, 302 bp, Oryza sativa
cttctgagaatctgaaaagcagagaaaccttctggataaagctccaactgtgttgagacctgcgttatggaaccagttggcaacgacaaaacgggtgatgagacaagactaagagtagattcgcaataatgtgagccctttcttgtagtatgaaaggaaggcgaccagataccgatgaagggttggattcttatagatcagaactctcactttgtagcctgtaaatgtctcctttgtacttagctgatctagggaagacaacgaacaccaacacacgagtagggtattacacctccgggtgc

SEQ ID NO: 75713 - DNA, 415 bp, Oryza sativa
  unsure (1)..(415): unsure at all n locations
ttctggcctacagctgtgtccgatgcggacaagattgtgcggacatgccgaaggtgtcaattttttgctagacaaactcatttgccagcccaagagttgcaaaccatcccgttgtcctggcccgttgcggtctgggggcttgacatggtcggcccgtttaaaagggcagtcggcggttacacgcatctctttgtggctatcgacaaattctccaagtggattgagactaaaccggtcatcacgatcacagcagataaagctagagattttttcatcaacattgtgcatcggtttggggtacctaatcggatcatcactgataatggcactcaattcactggcggagcatttaaagacttttgtgaagacttcngcattaaaaatttgtacgccttcgtggcacaccctatgagta

SEQ ID NO: 75714 - DNA, 441 bp, Oryza sativa
  unsure (1)..(441): unsure at all n locations
tcttgtagcttgaccatagtgtcttatgcttctttgttctggactgatgatcttttgcaaattctgtatcaaagattgtgtcattgattatctcaaattctttaaggaaactcattacactgtgtgttgggcccacaccccttttgaaccttgcatttgtcacctcacttagtgctgtactgtgaataaatgggcaaaaatctaatttaaagacaatggtatatagttttcccttgttctccacattgtctgtangtatttgatgttttgcaaaccatacttttcaatcatttgaggccacaatgtttcaaactcaactcttgtcaagcagttgtgaacaatatcataaaaatcattgtagagatctttatttttcttttctgaaaatgtgtttcctgtcctttctctccacttcttcataatatggaacaagcaattcgt

SEQ ID NO: 75715 - DNA, 396 bp, Oryza sativa
gttcatgatcccagccagctttaacaatggcacataatggagaagacgtgcttcttaatggaatcgaattacaaaattaataccatcagatttagatacccacattaaagtgggccttttcttatactttacctcaagctagctatttgctagctatgcctacatgtactaacttattatgtttatgcgtcaaatctgattttgtcatgatgcaagcgacatcgttatgtttcttgcttttaataacatctgaatcgacgggctttgtattattcttatgaatcacagcttgttaaacagtataatgtggtactctagtgtcacgccgattgaaccaacacatctgcctgccccgtactaatatgacatatcggcatgcgtacatacatgctatac

SEQ ID NO: 75716 - DNA, 264 bp, Oryza sativa
  unsure (1)..(264): unsure at all n locations
tatagtatgggctactggaattggcttgaaaaacaatcttttttaatgcactgggtggtattgtagctgtagcttantgaaacgtntctctttgcaattggtaaatctttccaaattcccataagatcactgattttgcatgcacacctgcaggctgatttattgggtagccctgttgtcagacctgctgacatcgagacaactgcccttggagctgcgtatgcagctggattagcttgtggagtctggtcgaaagaacaaatt

SEQ ID NO: 75717 - DNA, 469 bp, Oryza sativa
  unsure (1)..(469): unsure at all n locations
cgtgaagcgcctgcatggagggcactatgatgccgataagtaaagggcaacggtgcttgcctcgatgctgctgatcttcacctgcaggacaataaggccttcaggtaaggtaacacatctatctacctatctatctatacctatactaaccgttgattagattagtcataaaatttgaaccgtagatccattataatttaacgtattgagataatctttcttttagatntggaattgtgtgggcccatcaatccgtatagacgcagttgtttgggacttcctgttgatctcatcttatcactaccaataagatcatcaccaaatcaatatcacacaagcatgggacgtcngctgtaatgggatcgagacgatgctccagctctccccccacaccctcggctggtacttcgcaagtgttgtcttgcacacagatgggatttggaatacgcttcatctgctctacttaaat

SEQ ID NO: 75718 - DNA, 432 bp, Oryza sativa
  unsure (1)..(432): unsure at all n locations
cctgcaacgatttgcatatgtgagctactgacccggtatcaaatacccaagaatcagtngaggaagtagcaagattaatttctattacattaatacctgaggtggaacaatctttcaatgacctgtcttctngcaaaagaaacactctgcatccttagcgggccctgtcctttgaactctggttttagagttgctaatactcgtgatctcatcagagtttagctgtctcttttgaccactcttcttgttgttgggcttgcgcttatgcataactattaaatggttggagtttttcttaatgctttcctcggctgtatttagcatcccatgcaattcggccaaagtcctgtatatgttgttcatgttaanatncaatatgaacagctcacagctcggatggagcgactggagaatcaaatcattagccaactc

SEQ ID NO: 75719 - DNA, 486 bp, Oryza sativa
agcttgcacttctaaagtaacatttgcagcagttcatccaccattaatggtggtcttttcgatccagtggcatctcatgttggtccatactagtggtacagcttaacaatagactgttgtataaacacagcagtatctgggacgatactcgagtaatacataaattctattctacatatatatctccatgccaagtattttcgaagactggcatagcgggcagaagctcagcttgctttcgcactccttgcaaaggcaaagatgccgacaaggcaacaatagcatgcaagcctcgcttgacttgcagactctacatgcggtcaaatctttggagtgtctggtctccttcggcattagttgcaaagtggcggcaccaccattgcaacaggatgccgtgtcatccacctcgctatcaccacaaccttctttgaaatccttgctttatgggcacatacctgttcaagtgacttagtgcgtatcatgctt

SEQ ID NO: 75720 - DNA, 373 bp, Oryza sativa
gcgaggtgatcttcttgcggaggagcaccgcatctagctgtctgacgtttggggtcttggcggtgcggaggtggtggactagcgccggcaccacctgcgggtcccgcgccagccgccggatctgcttctctcgctgccgccgcgcgtcgatgtcgggcatcaggaactggatcaacaggagctccagcgactgcgccatccctccctgttgccggcggcggaggtggaggcgagagggccaaaaaccctaccgattgattcgagaggaggcgtgggttgctcgggtttcggtgtggcagcgcgcgtggggggcgggagtgggcttaatactactagctgggaatatgctcttttcgtttatatctctcctgat

SEQ ID NO: 75721 - DNA, 300 bp, Oryza sativa
  unsure (1)..(300): unsure at all n locations
acagaagaagtgtataccatagatcgatccatgtcgtttcagaccaattttgcccaacctttcgggatatgtggcttcatcgatccaacagagagaaagtttttgttggtgaaacattttgcaataaatatacagttttgtcttgacatacatactatattatatatgttcatgcgatggatagttttttggaataactagttttattttggaatagctaagaattttcatatgattgattgtggcgcttgtaatgtttacggtacttgacattatangaatctatcgcgtgcacacacc

SEQ ID NO: 75722 - DNA, 447 bp, Oryza sativa
  unsure (1)..(447): unsure at all n locations
aggtgatggagatgctccacatcaaaaccacattacattggctcagagaataaacattatggtggatgtatcagatgcactggagtacctgcaccatagcaaccaatgaacaattgttcactgtgacctgaagcctatcaacatccttctagatgataacatggttgctcatgttggagactttggccttgcaagattcaaatttgattcgacaacatcatctctaagttatttgaactcaacctcctcgcttgtaataaagggaaccattggttatattgctccaggttactggtaactctaccttgttttgcattgctacatatttaatttattgtctgatatatgccaacttgtgaactcaactcntgtcatatgtaattntataatgctcngatggtggtcaaggttcacttgctcagatgtatacagctttggagttgtctc

SEQ ID NO: 75723 - DNA, 351 bp, Oryza sativa
  unsure (1)..(351): unsure at all n locations
tctggacatatctgagaaccattttacttgaacgatcccagagagctctggaaagttgatgaacctaactaacttagtcctggaggcgaacaacttctccggcgaaataccaacaagccttgctcagctttcattgctggtgataatgaagctgttctaaaacaatctctccggccagcttccggcggangctcggcagcactcaccatttctgagagacatcgaggtcgacaacaacgacctcaccgagccgggggtctgcgacaaccttattatcacaggggaattgggaatagaggagggtgagaatgacatgtggggcccacgtgggtcctaccatttttaatctaa

SEQ ID NO: 75724 - DNA, 124 bp, Oryza sativa
agcacaaattaaaagtgtacttttcagtcaatttacccagcttttttgcctgaagtaatcctgtgctagaatcctttttttgaaggcttcgaatgcttactgacggcgatattacctgggaaaa

SEQ ID NO: 75725 - DNA, 308 bp, Oryza sativa
cgagactggtggtcgcgaaagtggagctgccactgcggtggggctcgacgtgtggcaacgatgacatgagcctagctgaattgtgctatggcatgggctatcgtgctgtcctgacccctattgtcttgaacaagtcagagtctcccaagatttgatatgatgacgataacgttgcatatttgccaatgtttgggaaacttgatttcttttcagcttgttgcatggtcatgtgaactttatttgctgagtgacgagccatggtgacctgctctcgtatctttggtagcctaatgtaactggtggaatgt

SEQ ID NO: 75726 - DNA, 420 bp, Oryza sativa
  unsure (1)..(420): unsure at all n locations
ctcgaatttggaagcttcaaacacganatgtaaactttcatagtcaaattttgaaaacatttgactcagatgtgaagagtttcaagtaaagaattgaanatattcaaatcaaatttcataacattcagccgaaatttcaatatttgcgaattgcaacccaatttcaaaacttcaactcaaaagtttgaactttcaaatcaaattttagaaaaacaaaaaaaaagcgtcgatgctttgcgtggcgaattttttggcgcgacgtgaaataggtcacgtggcaacattttttgtcgcgaagcgtanggaaaggggaaaacgccgctaccctagctcggtcaacgtgcgaatgacttgattggttggcgcacacgcatgccatatatgagcccccagccgttgaaccactcctcacgacaatga

SEQ ID NO: 75727 - DNA, 358 bp, Oryza sativa
tatatacgaaccattatatcggaatacatgactagagctcagagttcttgattaaccagtttaagcacatactacgtgtgtgagtacacactactgccaaacaactattgatagtttaaacatgcaacccatcatcttgtggcataccaaatacctgtgagcgttaaccaccaattaagtgtatgattggccgctcgactgaaataaacgatgatgcatgtgtgccttactgaagcatttttctacgagccgactcgcataggcacagatttattcacaagactgactcccaccgcatggcatgacgcattccctaggcgcaaagttccaactctcaacccacggatgtgtagcacat

SEQ ID NO: 75728 - DNA, 416 bp, Oryza sativa
  unsure (1)..(416): unsure at all n locations
ttcactatttaataaaatatatntattattattaataattaatatcaagatgatgcatgatagttaacttaaaaatgtgctaataataaaattgatattgtactataaagtagatgtcaaataattgtctttaacatgctttctcactataaaacctatgtaaactaactaagagcattgtttcatattaattaaagcatatgaaatattagtgccatttattagtctatgtccaaatataactaaacctatgacttataaattatttacataagtttagcctcatactttgtaactaaaatataaacacacttagatgaaccttcaacttgtctaagaagaataataactgagctagtttgtaatggaccacttaaaagttagttggtataatgtcatgtgaagtggaatatata

SEQ ID NO: 75729 - DNA, 473 bp, Oryza sativa
  unsure (1)..(473): unsure at all n locations
agcttctactggccacacggttgtgaggtggtgtcctagtganaccatgcagaaacagaggtctgtcagtaactgaaaaagtagattaaaatattgaaaagtaatacatgccaatttatggatagaagagctaatagctcattactgcgtatgttatctttactagttaatngtattgctgatgtggattgttttggagccaaccgtagactatactattgaccttgctcttatgatcagtttntgtttgactcgaaccttaggcaatttcaaacttaagtgacactatagtattgacttatttgcttagtatagctagttggtattccttcacaatccctcatcactaccacgagaagatggcacttcatgatgaactaacttcttanaatggcatccttttatccttttgtattcctactancttatagtggaagtataaccacaccatagcttaccgatcatatatacca

SEQ ID NO: 75730 - DNA, 316 bp, Oryza sativa
  unsure (1)..(316): unsure at all n locations
agaacaggccatagcataaggtgaaaagcaagcagcttaccgtggcggcattgctgcagcagtaagaactggaggtagaagccataatatgtacggttcgctctctaatgattgccttgcatactcacaaatatccatctcctattggagttcaaaggttcaggtaaaatattactttctttaaagaacagcgattaacagctttgagaaatanagaacttaaacaattcttgtccactgaaaaaataagaggtaaataatgaccacacatgaaaggacttgatctggccaacattatgcccgctaaatatttttt

SEQ ID NO: 75731 - DNA, 449 bp, Oryza sativa
  unsure (1)..(449): unsure at all n locations
gcttcttccatagtgactttttcttcttctttgatattggggttgtcgagttgctgtctttctgtcttagcggtgttgccagagcctttacaggcatattctacaagacacatctactgtatctgagattttataatgagaaaaaatattgaacttatttgagagaaaccccaataaacgattagtaacactaagctaatcaacttaagctatataacagtattaatctaaatatcatgcaaaatatttatcataattacctcacatccaatgtgcctgctttcatagtatttntagtacacacaactaaactgaaagggaagtaagagagggcacttacctctggcttatcactaatatcgccagcgaatgagtcgtcactagctcccnctagagaggaacatctaccccaactttctctgtagagcttgacatgagcaggattctca

SEQ ID NO: 75732 - DNA, 358 bp, Oryza sativa
  unsure (1)..(358): unsure at all n locations
tatcctctgaactgaagcggagaacttatgagagatgtttactntctgagcactgccaagcaaggatgtggggatatatggttcgccatttatcaaacggaaacaagggatttgtgacttatattcgcgcgttgggcatgtgtatgctatcacagctggtcattgtatttgaccatattacagtgaagatgaacagtctgggatgggtggcataacaccacccagaatcagaatgaaccttcgcttggtgggaggaataggacacacttgaactgcagactgatagatcagtctttaacttgccagtgacattgttgaaggactgtgagaaaaaaaaataaaatgcttgttttactgc

SEQ ID NO: 75733 - DNA, 487 bp, Oryza sativa
  unsure (1)..(487): unsure at all n locations
taagcttaataattggattattaaccttcgagggttaattacctcttttattgtgtactctgtagttctccaaggccaacttgcctacatgcatcaacccgatccattgttctctcttggatgtggntntggcatgatattttgctgcaaaacattttagagcgaaaataatttgttntaggccagttctaagctgatatatgcagctgtgttatcagcgcacaaataatttgtttttgatagctctaagctgatatatgcagctgtgttatcactatcagatgagtttaaggtttttattagaaccacacctttatattttccgaaatagcatgctttcaggtactttataatcgacatatgacgagatagaaacagttctcactattatattatttnttggggggagaaaacaagtcttattattatatacagggtccaattgagtagatcaatatcattaatagaaatgatggattcattgatt

SEQ ID NO: 75734 - DNA, 409 bp, Oryza sativa
  unsure (1)..(409): unsure at all n locations
cagtttgagactgcaaccagctgggctattggtggagggcacgcgtttgacaaagagtaaggcacaaaatataaggggagaaaggcagcaccgacaactagacccactaattttctttttgtttctgctgattggatcaccatgtatgaaccacatatgcttaaaaccgctctagatttaggagtcttgggtatcaaatgtctggcattattgtagattaagggtgtataaattacactactcggcggataagttntaagggtaattcgaactgtttttcatgccaattgtaatagcctgtatgtacgtatggtggcgactatctcacctatatatataatgatgaacanatgacgatcactattctgttcaaaaataagaactacctagcttatcttagttataaact

SEQ ID NO: 75735 - DNA, 306 bp, Oryza sativa
gcacaatctctctcctagcgttagcggtgacgatggggagccaaacccacgccgtcgagctcgtactccaccagccccttcacgccaaagtcctatgagggaggaggtgctccagagggtcgaatgatccgcgacttcgacatccacgggtgatggagaaaggcgccgagatggggagcgtcgcctcctcgtctacggcgacggcagcacgccccaaggcgcgctccaagctgcgggcgcgctcctgcgtcacccgcctgtcgttcctgaccccgagtctccagcccaacgatggctggatgacgt

SEQ ID NO: 75736 - DNA, 347 bp, Oryza sativa
  unsure (1)..(347): unsure at all n locations
gcattctcagtctaacagagtaattgatagtcaacatagcttgtataagattctacttgttaggcttcaaaagtcaccgtatcgtcgaatcagttaagccatggattcttcaagcaagctgcagctgtgggtctgttttcaggagtaaaatctagaattggacgaagaaaatcagcttaaccttgggcatcangttcagtgaaattgtatctctgaacaagtagacgttctagaggccagaacttcagccttctgatcctctttaaatcttcatgccgatcaaagtaatcctttgaacgagtacctgagctagcaatctgaaacagaacagaaggattagagaaaac

SEQ ID NO: 75737 - DNA, 496 bp, Oryza sativa
  unsure (1)..(496): unsure at all n locations
ctgacgcatgcaagcttggcaccattagtagccctactaggctattatgccccataaagaacatcttatatcattaggagcaagtaaactagtctaaaaggatatgcctactttgcactttattatatggtatctggccagaagcattgctacttaattagacttcactctatgccaaatatgattacctcaaaatgcagaaccaaggcagactatgcaaggttaaccacttaattaggcttctcgaaatgcagaactaacataatcaaacttctatatcttgtaaagtaggggctatatgaagttcacccaaactgtaacgctatccagttntcttgtctccagtgccgtcaatggggacacaacagcaatgaaatattaaaatgtggacactgaccagttctcgaatgtaatttatgtaagtatggagatcaagatcttggattngtaaaaaggacatacacctctgttagaatttcaatcggtactctcattg

SEQ ID NO: 75738 - DNA, 417 bp, Oryza sativa
  unsure (1)..(417): unsure at all n locations
atgttttttagtctnttcccggccttggtgtttggtgtagaccggatttgttagataggcgccgtactatcaagaggggtctatgaagcgagcttgtggatgatcttgtgccatattagttcatatgcatgtaggtgcattttgtggacttgtctaaccaagtgtgatgagttttctcaactcctaaaccaagagagaagtgggcatgtccaataagagtgagtgacatcttgtgggtatgtccggtggatatcctttggagtgtgagccctttatccttgacttaagttgtgtntcttggatgggattttcatgggttggatggccctttgataagctttcatagagtccaaaacgccaatttcagacccgataagagatatgtctttactacggcggtgactacaaggactacgt

SEQ ID NO: 75739 - DNA, 282 bp, Oryza sativa
ctgtcaaaacatcgtcctacgtagtcgagcactgtatgaatatttatggcacactacttattctatactcaaccagatagataattttgtcagatgctggaatccacaatcactcaccacatgacatcgcacaataataatggagcaatataatataatgcagcaggcaaatcacacctttagctatcggaaacgcggaccattatcacggcccacccaataggcaacagccgaccactacgcggggcccgcgaaggtcgattgtaatgggccatctattct

SEQ ID NO: 75740 - DNA, 392 bp, Oryza sativa
  unsure (1)..(392): unsure at all n locations
agaatgctntactgttatcatntggagtctatatattccggaccacctatggtttctgttctccattgctgctgctgataatgattattatgtgccataagattcattcctaattctctgtctgttagctacttcctcacgttaacaatgtaagtcattctagcattttccatattcatattaatattaatgaatctagacatatatatctatctagattcattactatcaatatgaatgtggaaaatgctaaaatgacttacattgtgaaacggaggaagtatcattttccaagtctgcctgatgcagctattcttggcctgagtcgaaacttgtaatgcaaatacgcaatgatgcctcatagacttgaacaggggacgacatcaagatgc

SEQ ID NO: 75741 - DNA, 410 bp, Oryza sativa
aatcatgtgtgcccttatatgtatggatcggatgatgaggatgatgattctgagatagctgcagccgagtgggtaaagagtaagaacgttataccatgccactgcgtaaaaagctcatgtaaagaggagaggtatgactttgatataaccaacgctgatcaaatatttgacttgctactccgagagaagcagattcaacttcctgccggtaacacaattccatcggctgaagaattgggcaagaaaaggtattgcaaatggcataattcttggtctcatatgactaatgattacaaagtcttcaggcagcagatccaagcggctattgaaggaggcaaaatcaagtttgacgactcttataggccgatgaagggtgatggcaatccttttcctattaatatggcgcatac

SEQ ID NO: 75742 - DNA, 435 bp, Oryza sativa
gcttcttaactaaactcgctcatatgtaagtcttaattaatgtcttgaatctatacttgatagcccaaacaatatattgtatatctttttgatgtttcgccgtaccgttagcacgggcatgtaactagtataaaatagttatcaaatttttttaaaagaactgatcagatagatcaatatgaaaatatttcactccataaacatacaagtttaaattcaacttttataaattacaacaaaaatgacaaatataaccgtgaatgcgggttaactatttccaatttaatttattctttttttaacatgtggacgttgaatttaggagtattataatactcaatttgttcggctttagatgagtgagaactggcacagcgagaactggcagagccctggttccggggaggcgtcggcaatggaggcgctgacgatgct

SEQ ID NO: 75743 - DNA, 198 bp, Oryza sativa
tactattatgtaaacagtatttgaaacgctggacagggggggtattcaatcagaccaggtgtcctttgcactacgctgatctctataggcctaccaaaggaaaacatgacagtagtggggatatggtggatcgagatgtttcaagaaaaaggtgtctgtaatgtctcttgttgggtgtttctgatggaaagattgaca

SEQ ID NO: 75744 - DNA, 306 bp, Oryza sativa
gtgcatatgctattttatgtgacttgagcaattctgttgattcacagccaatgcttcaagagcttgggaagcagaatccgcaaatcttgcgggtgattcaggaaaatcatgctgaatttctccgtctggtgaatgaatctcctgatagcggcgctgctggggggtaagaaccaaaagaactacagaacatgtattatattctaattgatacacatacaatatttacattacattttatacgctctggtaaatcagaaacatactaggtcaactagcagccgctatgccacaggcacttacagttac

SEQ ID NO: 75745 - DNA, 325 bp, Oryza sativa
tgccgctatgcgtgctctcgacgtgccagcacgtgctgatctgttttatttcgcgggctatatatacggcggcacacgagtcagaagacacacacacaccgtgcaaaactgtgctaaaagctaaactggagatctcctttgtgatctcgtttgatttgagcgagcgagaaaatggctgtggcggcggctctctcgggaagaagcactgcaagcagcggcggcggcgtggtgctcctgtgcctcgtggctgcggcacttgtgatggaagccgtctcgccgtcgatgccggcggtaagacgtactacgtgggcgacgccgtcgggtg

SEQ ID NO: 75746 - DNA, 326 bp, Oryza sativa
  unsure (1)..(326): unsure at all n locations
atcatgttcaattgtgagttggacagctcgttccggatctgcatagtcagaanatctcgttccaaccggtcatgaaagttagtggaagtgtatgactgctttctttgttaggtgattgatagagtttcggtgtccataactctcgagctcattcatcgtagaaagcgtgcattgtgctcttcctatcgtcgtataaagaaaggtgtctgttttttcagaaagagagcanagctgccagaaaagtagaatgccgtgaacaagggtggtttaaaatcgtgcgtgaaccccaatttccactcaatgcgataaaagcggaggcctctctc

SEQ ID NO: 75747 - DNA, 314 bp, Oryza sativa
cgactctgaaagcacatatgagtcgaagtgcttggtcgaaagatgggatacaatggtacactttgcaagatccaagaacgagtcgatctgctcacgtgagagggcacgaaggccgcgaccacaggggtccacaaagacgggcgcatcagacaatgttatctcaaggcgcttctcatagccttcaaacccaatgggcgaggcaggggcagagccccaagaatcagccaaggacatcgacatttgatcaagtgttgcaaggagcagtggacaagacaggaaagaagagatcggagaagacaaaggaagagattgag

SEQ ID NO: 75748 - DNA, 493 bp, Oryza sativa
gcagcttagaacaccctggggagttgcctctactagatggatcaaatagaacatacaaggatggttttatgttctcaagatcaaattcctctcaatgaactatagtgatcaccctactttctggcccttcaagcttggtcacggtatctactaaacgctcgtggagctccggtgtccacctcagtcttggtttgttacatgatgcagttccagatgaagaccgagatgaactcaactgaactttaacaggagatcttgcatcctgcagatcctcctgatcagagcaagatgacactggaagagacataagttgcggtggtctgtcgtatatgtcctaaggaacaagaagataagtgaataaaatgcaaatcaagccatgataaatatttccaagtgaacattgaacaaaccttctgcatgtagttattgatacccattaaactagaggattaataaacatatcatttagtacagaaatatcaatgatgaagct

SEQ ID NO: 75749 - DNA, 293 bp, Oryza sativa
  unsure (1)..(293): unsure at all n locations
atcgctctggattntcattatctttttgaggaaactgatttttatctttatacttgaatagctagatttcacaacacaatcagagcgtgatgcatgtgagagtgagacgattgagattttatttatgagtgaagtatatgggcggtccctaaacttatgcgggtgtgtcatctaagtccctaaactcctaaaatgcatntttagatatttgaacttatcatgggtgttatataggtccaaacnagttctaacccacttcatgttctgacgtggtatttgcacggtggtgccta

SEQ ID NO: 75750 - DNA, 339 bp, Oryza sativa
tgcagcttcacactcaatgcctaaattatttgacggattttgttgcatctccaccgatgttatatgcaattggggaaaaaagcgctcaccaaagtgagtactcacctatgttatgcactatatagtccggagtagtatgtaatacagaacccgacataatcatcatatgcgtactctttatcagaggtggtaaactaaagcagtatttatgaatcccacatctccaacagatgatcaatatctgacgttgatccgggtgcaccgacagcaccgtaccgacgcctgaagggaggaggccacacgatgacgtggaacaatggagagaagccgcgcataccg

SEQ ID NO: 75751 - DNA, 457 bp, Oryza sativa
  unsure (1)..(457): unsure at all n locations
actcagaggtgcactctctgtgatggaagtaactttcattttccaaacaccataatcaagacaattcaaaagatggcgagcattatcattattagaaaattcttttccaacagatctcaacttcgaaacaatttctccaaaacgcttgaaataagaatcaatggactctcctgggtgcatctcanatctttgatattctttatgaaattgattctgacgaaccaattgaatatcattgtttcccttatggaaattgcacagagcagtccacatgtcatgagcggacttgtggtgttgaacacaattaaattcaccagaagaaattccaccaatgattgcatttcttgcacgataattaaaatcaacctgagccacatttgcaggcgtgatgtcagcatcatcgggcacagtgtaaggtgatttaaccttattccacacattatgcccttgcgactgg

SEQ ID NO: 75752 - DNA, 356 bp, Oryza sativa
  unsure (1)..(356): unsure at all n locations
ctctgtcatggtaacttaggatatggttagctgtggtgtggtgttgtagttgtggttttcgctcaattttccctaattaactgagcactgtaagagcactgtaaggtttgatcatgttttctccttaaaataggatatcttcttaatataaaacgttggcaacggcctgaccgttcgaaaaaaagaatggcaacaggcgcaacctaactaatcttacaactttactcaccggagatgtagatgacgatcggcacgacctcctcacaagtggatctggagtactccttagtcaccagcatgaaagacgaagccactgtgagctaacaccggaagaagctncaatcacatctttcatg

SEQ ID NO: 75753 - DNA, 413 bp, Oryza sativa
gaatatgcccttacatgtctccgagatgctttgatatatttcgaaacaatgttcaatatcttatcttgttttaaaaaaaacttcatttctgaggaaatgaggttttctttaaaaaaattaagatattaaacattgttttaaaaattactatggaatttcactaaggctgaaggctaaatatatcgaaacggcaggacatcttctcctattcctgcagtttattcatcagattaattaggcgctccatgttttggagaatatgttttcttcaaataaattttgtctacagcaatgggtaaaccactaagcttgctaagtttgcttcttaagatatttagattatgagataattcaagaaatgccattgataagcgtccacgtttcagaaatgccatcgactatcattcatatgt

SEQ ID NO: 75754 - DNA, 392 bp, Oryza sativa
  unsure (1)..(392): unsure at all n locations
tgatatctgtatggctctggcacacgccacctgtcatgcaatataatatttcccatataagtcgattgttgaatataataatctaagctgccagaaacaagtggcaacgaagaaacaaaaagaataaatggaatacctattttctttgtgccatcgtcaacatctatgggcataggatggttacgcccactgtcatncaaatattttatacaatgtaagntcataaataagcattatccctaccagctatcatcgagatataactgaaaaagtacctttccgatggtaaatattcactgtgcttaaaactctaacaatcttatcctttggtaggaaaggagttactctacttncatcatataaaagtcatgccacagaacttccatcaaact

SEQ ID NO: 75755 - DNA, 388 bp, Oryza sativa
  unsure (1)..(388): unsure at all n locations
tcccactatagggcacttcataaggaaaaaccaaggtcatgcgtgattattggagtccacaaactgtataagctgagctcccaggaccagttgctaccatcatcatctagccactgacccacataataatttgattacatgcaggtcactagtacattactatggcaaatactgcattctgctgtgttgattgtgcgataaaatttggcataaggatgtcttcttgcaagttgggtgaggtttgcttagactgaatatagaaaattccaaacaattaccctctagataacanattaaaaaaaactgtgggcaaagtacatgcctttctgcaggttgacattggatcctctgatagaatggaggataccaacaagcatttcatacataa

SEQ ID NO: 75756 - DNA, 225 bp, Oryza sativa
  unsure (1)..(225): unsure at all n locations
gctggcggcgtgataaccagtcaccttcttgctctgctggctgagccccagccggacctgcangtcgtatagctggatcgccgtcagcaccgacagccgcacccgccggtcgcggagccccttcaccgttctcaccttgctgtgacagtccttgccggcgaacacccttgacacgcgcacgattcgcgactccgtcgacgccgaccagtgccgcgagctcgccac

SEQ ID NO: 75757 - DNA, 384 bp, Oryza sativa
  unsure (1)..(384): unsure at all n locations
cagcttatattctcaacgtcacatcgttcaagaccacaactagatcactgtttttaagattgctcaattgattcatgccaacatgggctagcctcctatgccaaagccaacccaatgaagtttttgcaactaaacaaggtttcaaatttgcttcactgaattgacatcaaccaaataaagatttccatatctaatacctttgaacacacaagacttgncaagaaggctagaaacaataacctcttgcgggaagatagcacatgacaagccaagatcacaaatttgagcaaccgaaagcaaattgagatctagagatttaacaagagagacattatcaattgacaaatcattggagatagcagatttacctaacccaattacctt

SEQ ID NO: 75758 - DNA, 461 bp, Oryza sativa
  unsure (1)..(461): unsure at all n locations
agcttgcacgatgcacatctttctctctgggcagcggaggataataattgcagctcanattcccgacacggtagtggattggatattgcaggtgagtgtcgctgcacaatggtatagctactcctacgcttgatctccctcattgactcgacgcaccatagacgaaaaagcgtgccagttttcattgtttacagtatctgttcaatcttgggcgtggtggccataatgatttgattcccatgttgggcgctctcaccctaccctctgcatgcattgctcgatcgacacgagagaacagggaaactcctagtcctagatagcaaccgcacaacacatcttcttgcaatgctttcttctgggatggtattttaaatcatattcaaatgctaattgtgaaacaagccatcatacatgggtagagtggaaatgcttaattgtgtgcataactaagccacaagatc

SEQ ID NO: 75759 - DNA, 389 bp, Oryza sativa
  unsure (1)..(389): unsure at all n locations
gacactacacaatactatagctnggcaccgcggtcgagttcgacagcgaggcgctctaccagccatccaacttctcgagcacgcagtggccgctgatagcggacacccgcggtgactgcacgtgttccgacgagcacctaatgaaggagcacgtcgccgggaagctagtcgtgtgcaaccagtgtggcaactcgaccggactccggaaagggagctatctacacgatgccggcgccgccgggatggttctcattggccctgagttcatgggctcaatggtccaacccaagtcgcacatcctccccgtggcgcaaatcgtctacttgtcgggggaggagctcaaggcctacatgatatccacgaagagtccgacggcggcgctgatctac

SEQ ID NO: 75760 - DNA, 464 bp, Oryza sativa
agcttttaattcatcgaagagacatataagattacccatgtgtgtagagtctaaattacaatccacaggtaccacctaggtttatattcatctcaatattccataagtcgtagagctacaaaccaatgaaatcaaattaactaactgttctcgttttttttaaacaacactactcttatgcaggataaaaactactagaatacaaaagcaatcttaaaaaacatatatactggaaggtaagatataacttgtgcgtgtgtgtgtatgttgtgcagggaataaaaaatgaataacatgagttaaaagacttataatgagacttactgatttaatttgcaatatcaacaattcatattaagcatcggaaacttccgcgtacctgtcagacatcgtacgccgcaatcaaccatcaaacaccctataaacagcttctctctgatagcaacatagtgcatatgcaatta

SEQ ID NO: 75761 - DNA, 445 bp, Oryza sativa
gaactaagagccagccatggtggtcagaacgcagtaatggccgctacaatgaactggtccagttcaatgtgcaacataatgtagacttagttggtctagagtgaacacagtgctatatgcctagcccaagttgcgacaagggtaaaaataaccggcccaatgtgttattgactctaaaaatttactcctgagtaaatttgcgagtaaaatttttactcatgatgatatggaccaaactcatccgttggatttgtttccgttggatttgttttggaggaacgagattcaccctatctcacattatgacatgcctaccctatgtcacccaatcccaatacatcgcacacatataaaaacacagttgcctaggtgaacaggttaaccagtccacctatatggcatgtaagtatcctgcagaataaataatacatgtttcataagccgc

SEQ ID NO: 75762 - DNA, 324 bp, Oryza sativa
ttatgagggacccacattgagaaaacggactagaaaaactcgagttctatcgtcaccgtcctatatattagtggtcccctagaccatgggttagacagactagatcacgtctagacgcaagactgcacatttcatctcatttacggcctaaactgtgccctagaacatttatcttgctacgtcgcagggagccatggtctataccatgtaacatatataagccagcatgaagctcgacactagactattgcttcagtgtacaccacccccgcacccctgcgccttctgagcaagctcgagctccaacgttggtcacttggacac

SEQ ID NO: 75763 - DNA, 289 bp, Oryza sativa
agggacaccaagcagacttctggaaagagagggaaaagactgcatgctgagagagatattgggcccatctagtgagaggactttttctatttcgcccggataggaaaaaggggactctaattactgttctaattaaattaatcactgaaatgatccttgaattgttaacaatacttctattgctcaaataatttcaagaaagatactgaacatacttggacacttgacgtgtttagaaatattaaaactagaccatttaatgattaacttaatatgtggataattactg

SEQ ID NO: 75764 - DNA, 274 bp, Oryza sativa
tgcggcaaatatagcttgtagattcacttatttgttgcccgttgaaagaaccggggcctaccactgtgatctgatcttcatgtaatgtatatagtcctttaccattattccctcaattcggcctctggcatatgacgtcgcttaacttaattagtactcttggaactattacaaacttgaaaccaccctggtcggctggaaaaaaattaaaaaaaatcgaacagcatctggcgaactttcgccattagacatctttgataatttactctaacac

SEQ ID NO: 75765 - DNA, 388 bp, Oryza sativa
tgcatgcaagctcagcaagtgtgagttctggttgtccgattcatattcttatggcacgacgaatctgcttaaggagttgctgtggatcccgaaacactgaccgccgtcaccgatcggaagctacccaagacagtctctcaaggacgccgcttcttatgtttggcaggatactatcggagatatatcgagaacttctgctaattgctcgaccggtgacacagttgttgaagaaagaacagaaatttgtgttgagcccgccatgcgagaacgcgtttcaaactctcaaggaaaagcgggtgtcctcgacggcgttaatcttgccggacacttcgaaggacttcatggcgtattgggatggttcacaccaaagagagaggtgcgtgctcat

SEQ ID NO: 75766 - DNA, 269 bp, Oryza sativa
attctactgttaccaatcggtacgcctccaccagtcaacctaacccattggcaccggaacagaaggacctttagaggatcataatcaaattcccatatgtccttgatggcaccctaatatgtgccaattgtaccatcgtgtcccatgggatctataccaacaacactattttgggtcgtgctcttcatgtcttgggctctcgtgtagaatgtgtacccatagatttcatatccctggaatgtcgcgatctaaccagatgggtccctcac

SEQ ID NO: 75767 - DNA, 417 bp, Oryza sativa
  unsure (1)..(417): unsure at all n locations
atgccacacgctacatttctgaaactacgtaatttccacaaacattagtttgcaaagatacaacatgcatctcacatgagacatggtattgctgggaggcacacacggtgtgctatgagtgacctgtcaagagctctgcaccatcaaccaagaatttacagtttctgattcgaatgaagaatgccaaatatgtgcttgctccagctctttgaatgtaatgatatgtggtcccaaccttttcatacttacgtgtcagctctcaacaccgcaaattatgcaaaccacctttctaagccagtggttttatgtgaaacaaaaacgcactgctcactgaatnttttgctatatatacaccacgtcttttcactggctaatgacactagaacttaanctaagatcaaagctttctattattat

SEQ ID NO: 75768 - DNA, 328 bp, Oryza sativa
  unsure (1)..(328): unsure at all n locations
ttaagacatgcgaattgaacttttatgctgaataaatttgtcatgtatggtttcacttatcgattacaatggttcaatttggtgctacgtatgtcaaacaatctgcgtttttttggttttccaaacaagtttgcttcaaatatccggattaagtaatgaccgagaagatgatggcacgcacgcacggcaccggggtatttatctatgttatcntttggatgagcttaagaatttcagacggntgatgagtagtcagttgaaaagaatttggaaaagctggatcttcatttctggctactggcttccggttcggttttagaatatatct

SEQ ID NO: 75769 - DNA, 352 bp, Oryza sativa
ttactaccactaacctgctactcctggttaaccttcacatacccttacacgtgcccctgctggatcacctacgcatacctactcacgtttcctttctcagtcaagacttggttggtaccgcggtcccctcttcttcattccaaaactggatgctctcctccgcgaatgtatcgtcaaaatctgttactcatcgcgtcaaccatctgggatcaagaaacatctgctaagcaccagacattattgtttaacaatctaagcatgatgctaacgggaatgtcgtcattagaaccctacacaacttacgtgctaaggcaattccaaacatcagatagctaaagcttgtgacgatata

SEQ ID NO: 75770 - DNA, 375 bp, Oryza sativa
  unsure (1)..(375): unsure at all n locations
taatatgttataacctgccactaatagagaaggaaactatgcagatagtacaggtgcgtactacctcattcgttccanaaatatcaggattctatctatataattatatgaataaaatcccttatattttaacatgtaaatactagaaaacttattgaaacagtactgtcagtaaaaatgagggggatcaagtgaccagtcgaggaagcaaagctgagtttttcacaacgcaattaatagcacagagaccgacgatctgaagatatgatagcagagaatgactttaatntcctggaccatttgtncaccaacctgtgccaacggttttggcgacaaataaccgagcagtcattaataaaaccagtgaaattcata

SEQ ID NO: 75771 - DNA, 285 bp, Oryza sativa
tactttccgctgcagttttcttcatggagaggactaagcgcctcttatgtaagtatttatcgctttaagtattgtgatgaatctgtatattaaatagtcagtttgtgtacctcggctgattcctggacgagggttgtaatgcacaaattagtttggagattacttgagaatatatgggcgtgacatcacagcataggtgcttcacccaggcgtgcacctaacaaataaggtgcgtcaagtttgaccaatagtgatactgattgtggtataataataagattagat

SEQ ID NO: 75772 - DNA, 309 bp, Oryza sativa
  unsure (1)..(309): unsure at all n locations
ttagagacttgaaccaactgaatcggagcttagatgaattagttatgaattnttaaagaataaatcggattaaaacacttaaatcggttaaaattgaattatgacgcaataatgaattatttttgaaaaggaaaagaaaggttattgcgtcagcggctatggtttctgtggaccgggcgcacgggcggcggttcacgcgaacggacgggcgagatcgatcaatccaaaacggacgggcgagatcgaacggttcacgaccggctcacggcggacgaccccgatgacgttagcgatgacgtcaccgacagc

SEQ ID NO: 75773 - DNA, 408 bp, Oryza sativa
tcttgaagaaggtccattaatgcattaaagaaggtccctgtgaactacctctgtcaactactgcaatgcagctataaactcttaatccgtgagctgtaagattttgtttattttcttaattgaacgaattgatcgcatttgcatgtatactgcaatctattgtgtgatattatggagaactgcacaccattagcacctgcattgcttattttataaattacgcccgacatctaataacaagtgatatgcattcttatgctccttttctaatctataagtttcaatcagtttattatcataacctttattggagtattctcttctgaaatgctgatgatattgagctatcttgttatcgaattatacgtatatcagcactcttgatcatcaaatattaattaagttcac

SEQ ID NO: 75774 - DNA, 450 bp, Oryza sativa
  unsure (1)..(450): unsure at all n locations
actctcacacgctcacttactccgtaagtctgagcattctggtgcatatgcatatatgcgttgcaccatacagctagcttcctagggctagtttagaaaatctctctgatcgctagcgcagcgttctatcaaaagcaaaaactttcttaaacagaccagtattttctaaagtcaaaataatattgtggaattcataatagtaactaagagtcagaactatgcgttcttagcttattcgaaattatcactagatggatgtacatcacgcgtttctcagaatctaaagcgactgacccaaagaaactcttggtctgtatctaccctgcttggtgtgtgttgatggcctaaccatccagacatgaaccaaccacgtgacactaaccaaccctgggctntgatgagccctacattgagtaacaacaactgattgatcactctaggtgacatgac

SEQ ID NO: 75775 - DNA, 417 bp, Oryza sativa
  unsure (1)..(417): unsure at all n locations
gcttcgcagaaccctcatcgacgggggcagtgttctaatatcctcttcgccaagaccttggatgatatgcagattcctcgctccgagctaaaaccaagcaatgcgccttttcacggagtaattccaggattgtccgcaactccactcggccagatcaccctcccggtcacttttggcactcgggaaaacttccgcacagagaatatcaactntgaagtcgccgatttcgagacagcataccatgccatactcggacgcccggcgttagccaagtttatggccgtcccgcactacacttacatgatgatgaagctgcctggtccccgaggagtcctatccctacggagcgacatcaagcaagccgtcacatgcgacaaggagagttgcgacatggcccanacccgcgagatggcgtct

SEQ ID NO: 75776 - DNA, 375 bp, Oryza sativa
  unsure (1)..(375): unsure at all n locations
gcttcctggtagtatgctcttttggctgttgtatagtcgggtactggatcgaaagctgaaaatcccagcatgcaaagaccttggtatgaaccttctgaaaangtggtccttcgtactttgtggatattaagaatagttcaagctgataccacctccgtatattatagggcatttttcttttggaaatatgaatatattaatataagttttttttagagaaaccgagagatttatattaccaaaccagtagaatcactaggtaccagccgttccagaccaggtgggcaggcgggcagcctgcccaggaagacacggtctggagattaaagccatacgcggcaagctcatgcgccaccttatcaatactagatcttg

SEQ ID NO: 75777 - DNA, 436 bp, Oryza sativa
  unsure (1)..(436): unsure at all n locations
ctcagcttgttactggcgtgcccctaacatttcatgtgggttttcatggaaccttctgttattgctttcatttgcttaaatggtgaatatctatcttaaggcaattatagagtggcatgatcaaggcacatttttgcctccctgtaatagatagcctgctttcaggttgaactctgactcatatttatatttatttttctatgctgaataaacttattcttgttcgtctttcttgattgttgagtaatcatggcatagatttagtagcaattatctcaccagcttggtactagtagcctcacaatcatgcaaaagttccattttaagctcccatgatctttgttggtcaattattcaaattacacatctgtaaagattgaagggaacacttgaacatgtttcagtagttttatggattatgaatntgatcagtatt

SEQ ID NO: 75778 - DNA, 383 bp, Oryza sativa
  unsure (1)..(383): unsure at all n locations
ttctatgcatatctggatctggattctacagaacaaacatatcgtgtgagtaggatgtgatataaatattatacctcgagagaaatttaagtatgtaaaatatttacaaatatgtatttctcctcttgtccatattgatttccccgagcggatgactccttacgcttaaatacttctgccgtctagtcataattcccaagcatcgggagtcggtcaaagcacttnccagacatgcatatgagtgacatgagttcgttattaatggagcaaagtattacggatcggagattactactctggtactttttgcattggtaagagcagaacaaaaatttatcctatctttattgctttgatttatatcgaatgatacttaacacctt

SEQ ID NO: 75779 - DNA, 388 bp, Oryza sativa
  unsure (1)..(388): unsure at all n locations
aaacgagacaagacacacataaagatccaacattagaacgtagattacaccgtatattacaggttaggactttgccaccatggagaatagtttccgctgccaggaagcggaattccgctcttgagatggctggaaaagttntgaaattgaaagtgaaaaggagtttaatttcgtaagtatgtgtcacttgctctagtcaaagaaaataaaattacttattaatagtaaattaacagtgtgtaagggtaaggaggaagaaatttacttgtcaatggcagcacatagatcgtgtgcgccgtagaagataacgatngagagccgaactatactgctattgccagtagtaaggtcaaccgatagtaatagctaataccagctatcagttttt

SEQ ID NO: 75780 - DNA, 315 bp, Oryza sativa
gtagccactatatcctagttcgtacagaggactaggacttggacagatgtcctacatagccagaagtagtcagatactagacaagccgttaccaggccgagggactagatcctgcccttgacgatgaagaagagatcgatccatgcgaagacagtaacaaaaagaacatctttcagcttgtcatgtggtaccttccggtgaaagaccgattgatgcgtatgttctcagacgcgacggatgcccaattgatgcgcaggcatcatgaaaagccaaaaaaggatgggatgatctagatcctgctcatgtaagacggtg

SEQ ID NO: 75781 - DNA, 389 bp, Oryza sativa
ataagatttctccatctacattgctcagatattattttacatgatatttgtaagggttgaactatataatatttaatattatactataaacaattatcagtaattcttcaatttctagagaaaaacttgtaataaattcgtaggagacatacatattgtgcaactcgcttccctattatatgtgatctatagtgttttttctaaaaaaagacctagtcaacatgagtcctaacattaaagttaatagtatcatatatgaagttttaaccaattatgtgttttatatatgcaataatacattgagaaactcataatgccatgatatatagcatagatggaaggtcattaacatctaatcacttaaacatgggtatggcgatggaacatac

SEQ ID NO: 75782 - DNA, 389 bp, Oryza sativa
cagaattataagatactctattgtactttattggatactacaagggggagagagaagggttaagaagccacaggaattcaggagttggcggtaatcctatccttatttttgtaccttgttaattactctagttcaatagaaatatctttccgattaattacaatttactttgtgagaattattcttggatagttcctaacagcatatgggatcattgttcactatagtccattaaaatatagttattgctttagtaagttataaacactagagtagttattaattgcttaaacgtggtgtttacgtagttaattctcagtggttgctacgtaccccacagtacattagaggtggatgtagaggtggtaacagccctcagaatcacttta

SEQ ID NO: 75783 - DNA, 473 bp, Oryza sativa
  unsure (1)..(473): unsure at all n locations
ctttactgcagcaganggtgcgtacacacgaggagcaattacttgcttcgagcaccactgcatgcgtgcagagcaacaggtcagtcaggtgaaatgagtgtgaagaatatatagttgcattcaggttgtaacaaggcaagtctctaagggaagtgatgctgatactaacatcttccagattctgattttctccacaattagttgcacaccattcataattccatatgcgcgtgcacatccaggtagctgctactaatctgaggaaagcaaaaactgatacagaaaaaagcatgtcagaatcacgaaagtggatcagatggaaggaatgaacgctcaaggtgttttctcactgtcatccgttgtatcataactgctgaagaactcaagaatcttctccctgtcatgagatgaaaaaaggcgcatgttcagtcattgagatgggatagtacatttagaaacaacacttcttccgg

SEQ ID NO: 75784 - DNA, 354 bp, Oryza sativa
tgagcttgtactattatcagcactaatctaccagctacgtcacgcagcacgatcaaactgaacatggaaaagtcttgcatgctattgatgtgcgctagtctagaagcagcaaagtataattgatgtgcactgccattagctgaagacttgcgtaccttggaaatcgcacgcggtgatagatacatgccaccttagtcaagcaggtcttccttaattgtcaagaattcacacacttgacactttgcaccatcctacacaaacaagtcaccggtgaataaatgacctgtaaggctggatcagtaaaaaatcttggagagaactgcacatgtatcagttgtctgtacaaacattact

SEQ ID NO: 75785 - DNA, 436 bp, Oryza sativa
  unsure (1)..(436): unsure at all n locations
ctcttatgaacacgctgccgattggtttggattgtggcctcnatgtccctgcgcttccagtgatcggctaacctctgtctggctntctctagtttgaattgatgctgctcaaggtagacagctggagttagagcatcaactaattcctctgaaagagaggcttggatatctgcaaatcttgccccgatcgagccacaggtggtcaccgggttatctagtgatgctcctagccgatgggagatgtctttgagtgttttcttcacatcatcgagcacgagagctatcgctctacttgtggngtcttcttctgtttcatcgaggtaatctttgatgtcaaaggagaacagatcggctaagacctgcaagagacaatatcatggatgattaaggatcaagatatgattggcccatctcacattatgttataaacttactg

SEQ ID NO: 75786 - DNA, 123 bp, Oryza sativa
  unsure (1)..(123): unsure at all n locations
atgatagagatggagaaaatacagagcgatataattatgtacagggctagtctaanaaagaactaagcccgcacaaggtgatggttaagtggtatcttcccagattccgaactcttgaagctt

SEQ ID NO: 75787 - DNA, 379 bp, Oryza sativa
tgcacagagcgtggaattcaacgtatttctccaactcgtgatgtctattgtcctatctataaggcaaagactcacgacctcttaagctgcaaggtccttctcagcgccatgaaggtgtcatcccctaaggttcagcaatcacaaatctctcctagagatacggacaaggaacaaggtgcggcgactactttagatcgattcgtcggggtaatccatatcgatccccacgagccatctgtcctacatttactcgaagacctgtgctcatcatcaacaagtacaccacgcgacgtgtacgctatcgatggaaccagcacatctagaggcggcgacacacgaatggaggatcaatcgtgtacaccgacgctgtgcccacata

SEQ ID NO: 75788 - DNA, 389 bp, Oryza sativa
atcaccttcgctgtagtactccttctctgatgatgattattgcaaggtgagtacatgaaataatcagcaagccacacaacaaatatgaaagtgcacaagagtacaaaggatggcataatacatgctcatttgcataaacgacatttaataaacttctttaaaatctataaaataataaagtacttaattaaacaattttaatccaccgctatacaacatacaccgtgcatatgtccaaccatatctgaacaaccatgcccgggtgaacagaccctatctccaaaccaggaattaaccattccaaacaaggatttaaaataattatcacttattattatttgttgagtaattgagactaaacacgaaagacattgctaaagctcgccata

SEQ ID NO: 75789 - DNA, 409 bp, Oryza sativa
  unsure (1)..(409): unsure at all n locations
acctctgagtgacctgcggcatgcaagctcgcatacaaccgggcatatgctaggaactacaatatatactacatgtcaatattgtacgtaccttagactcgttgtgctatgtacaggctcttgactacttccaactgagcttagcagtggtcaacattaggttaacattacatttntacaatttgcacgttgtcacttgtcaggttagttcacattatttaatcattgaatgctcaatctgttacatttgcaggtacacttgattaggtgattacctgtcctaattcacaaaaggaccgagtttggcagcagacaagagatgtaccaccagctcaatccacgactgcacgtgtaactgaacctgcgcctcgttagttcctcaagaaattttcccaaaaatatcatatcg

SEQ ID NO: 75790 - DNA, 267 bp, Oryza sativa
  unsure (1)..(267): unsure at all n locations
ctcagcctttaaccaatgcttagctggctcctacactgagcggcaatggtggcaccaaantgctgggcaggtgatcagttcgcctgtggatttgttgntgaaaacaccaccaagcagcacgtggtggccgatggtcgcgcttccaccaacttcttcagagtgtggatccagtcttgatgttggggagctactacttttcctacagtcttgatgttntgattcatttggagttttagtttgctgtgctctgattgtgtatttttcttt

SEQ ID NO: 75791 - DNA, 346 bp, Oryza sativa
gagatacctataggacgttccattcaagcagaacacacatcctgttttacctttaatttgacctgaaactaaaaacattgctggataatcgttaatggtcacgaagatgattgccttcactgtgaagtattcccttaagtactcgtcccacactttcaatccctctgtccataaatcggccatatcttccaacaatggtccaagaaatacgtctatatcaataccaggctaacggggtccctgtatgaggatacagagtagtacgtattttctcttttgacaaagccaggtaggaagattatacatggtgagaagcactggccaagtactatgtgaactgctcatg

SEQ ID NO: 75792 - DNA, 339 bp, Oryza sativa
  unsure (1)..(339): unsure at all n locations
tatggtggcggacagagtttacagaacttcttgagctggtaaaggatactgtgccagaggggaacaatttacctcagacgacatatgaagcgaagcaagtattatgttcgttgggcctggaggtcagaagaattcatgcatgtccgaacgactgcattttgtattacaaggaatacgctgacttggatgtctgccctatctgtggggcattaaggtacaaacgagcaaagagtgaaggtgaaggaagtaagtcaaagaggggaggcccagcacaggtggtgtggtatctcccaattgcngagcgcatgaagagaatgtttgcgaacaaggaacaagcta

SEQ ID NO: 75793 - DNA, 417 bp, Oryza sativa
atctattgttcatgcctccaagggacgttatatgaaccttttaccttttctgggagaagagaaaggtccaacaaaagtctgatcgcggtgctcttacatggaccgcaagtggccatggtttatatgggccgtaatgggccagatcctgaaaagttcttcggaggactctcattctgaacagaaaaattccgtcgttatttgttaacattaaaactaataaaaactgaaaagacaaaatcaattgatataaaaaatttaaaaagatattttgaacaaataaattttaatataatattttatcgagcttcatttggataaattctactgtttgaaccatctccgatctactttgggcctgttcagttgctgctttcgcggctgctccacaatcgacggtaacagtgccgcacttaccat

SEQ ID NO: 75794 - DNA, 418 bp, Oryza sativa
  unsure (1)..(418): unsure at all n locations
attgaacttcctgcaaacatatatatgtntcttgcacaattcagagagttgcaaatattgatgtaatctaacttggaatatagtcagcatgtagctattatttccagaaaaacatgtagtcaagtcagcagttgcaaaattaacatgcagtcaagtcaacaatgtgcagataaacatgcagtcttgaattcccaatagtctagttaatagtaattcaaataaacatgctctgtgtatgcattcccaatagtctaattaatagtaatccaaataaacatgctctgtgtatgcattcccaataatctaactaagggtaattcaaataaacatgctactagctagtatgcattcccaacagtgtacttgtggcccatatatatatatattggtctaatggtgctaactatccatacctctg

SEQ ID NO: 75795 - DNA, 369 bp, Oryza sativa
aagcctgctggacgcgtctatgtgttggacgaggctcatgagttgggcagtttcggagcgcaggtaaagtgtgcatccacgtgcagtgtgagtaaaccaaatctattaccatagccgtgctcgcgattattgagcaccgggacgtgtattacacttggctagactctaaatccttaacttgtgtgggatgggatattgcatgatgaattttatgctgttggagccacttcctaagacgtgggaaggtgtacgtcctcagaaaaccatgacgactcaatgtcaggaagctatcctttcgatcacaacggatggtggacagaaccgtcgttgttaaatgtgaacactggtactacaattagaacagtctat

SEQ ID NO: 75796 - DNA, 137 bp, Oryza sativa
actgagcagcaactgaccaaagggggaaaaagttactacttagcaagtgctatccaacagaaaaatcagactgctggtggcctggacagcaatgaagtaccttgctatacaagatggtcggcatgtggcattacttt

SEQ ID NO: 75797 - DNA, 386 bp, Oryza sativa
  unsure (1)..(386): unsure at all n locations
agtggatcgaaagccctcaaccaattttaggagatcgagaaagacttggccaaatttgatggggagaatcagctctagcattgggccggcacagaaccatcttgtgcaggtcgaagatggagacccacagctccacatgttagcttggccaaagaaaggatttaaaacatcttacccattgcaacgcacgggcatgtgttttctagtatatagaaaaaagaagaggagacaggatgctctgtctatgttgcttaaccctaaaacctatacaccttcgatcggtttaacgcactataagatggtcatgtatctgtctcacgtagtgcccgtgaagaccctaaggacattgngatcaagagagatcccgccacagaaattgatcgagt

SEQ ID NO: 75798 - DNA, 419 bp, Oryza sativa
  unsure (1)..(419): unsure at all n locations
tgacactggacccatatttcatagacacagatgggcccatntatcatccactcggagtgtcaaaacagcgaagccccaaagtttgcagtcccaattttgcaattttctcctcaacggttgcctatcctgtgccaaacaagatgtcgnttcggtggaaccaagctctccataacatgagcaagaaacaagctctaacatcctgagttaagccttgaaggatcaacaaaagccaatcagggcccgtgcgtgccagcaagtattatgctggcagcttccaacaggaacgaagagactccctcagagctctcgccctcatacatgagatgacagcatgaaactcatcctctacttccataccacanatacgataggtagcatcaacttccaggtttcgggagcatctatntcgtatagtagca

SEQ ID NO: 75799 - DNA, 357 bp, Oryza sativa
aaatgggggctgtatttttatctcatctctccgatgacaccgcaaatacccagccgactcagcgggaaacgtcccttttctcagccgacttaccttgctttgtctcctgccgtggctcagatcttacattgcccaaaactctgttgcaatgtttaactcattcaacgttattggggttttatggcgattagtcttctcggcgcatcagttgttggttgcggcatctcaacgcgtcgtgttctggactctcaccctttactgcacggagaactcgtccctgacaccctgctgcccattagccttcggtgagttaatgtgcctacaagacacgcgtgtgttgtttggactcgacacttt

SEQ ID NO: 75800 - DNA, 126 bp, Oryza sativa
ctttagattgtagtatgtgcagaacaaatggtgggtcctcacaactgttgagatgacttagtctgttgcgcccatataattaactaagagccatatatattccctccatcttttaatagatgagca

SEQ ID NO: 75801 - DNA, 461 bp, Oryza sativa
  unsure (1)..(461): unsure at all n locations
atgaacaaccaccaagcgctgatgtctctcgtcaataatttggtgaaaaatgcgtccgagaatatgaatacaaacatcgagacagaggcatcggncaaattggattccagatgcctctcatgatcaatngccccacagcacatgattaaccctcgctcggtttcaaactttctgtagatagtgtagtaaccaaccatcctcatgtgtatctctgctaataactagtactagcagtaaacaaccatgttaatttgtgatatctaatgtctgcaaataaactgccaaagcacaatgcctgaatatgttgttgtgtgataggtacttcacgtctcatggcttctcttatatatgactctatgtatgcagagcacatggattgacgtattgctcttcatgaaccaacatatcaccgtacagagtggtagttagtacattcagtgcaggttatgatctgaagaaac

SEQ ID NO: 75802 - DNA, 479 bp, Oryza sativa
  unsure (1)..(479): unsure at all n locations
cagttccctggtcatcaggaatctgcacagttcgtatatatcctacttaattatntgctgcgccatgttatgagatctagagattctctganaacccaccgttgctcgtgtggctagcttcgctggtgagcgagcagcccgcgcgggttcgatccctgggatcgtcacccgcgtgtctcaccgggatttattcccaaataaattttcagctctcccgtgccagcgccacaatagtagagtgacgtcctcgtcacacacaagggtcttatgtggctttgtgtatctcattaatacgtgtgtgtatagttgataggtctagcatgcgtgtaagggtgtgggtgtgtgtgcgtggtggaatgcgtttgcacgtatgttcatatactacagcttgtactcatagtggagagctctcataaaaaataatctaaagatctcttaggagagttaatacagactatagctgctataatatatttagt

SEQ ID NO: 75803 - DNA, 444 bp, Oryza sativa
tttcgccagggtgtttataggccgacagctcttaatgatgcggtcgacctgcgccggcgatgtagagcgtgtcaattccacgccaagcaaatccatcagccggcctaggccctgcagaccatacacactttcgtggccgtttgctggctggggactcgatatcctgggaccatttatgcgggccccgggcgggtttgagtatctgtatgtcgcgatcgacaggttcactaagtggctcgaggcttatccggtcgtcaagatcgataagcactccgcacttaaatgcattaagggcatcacggcccggtttggagtgcctaaccgtattattacggatgatggcacccaatccactagtgaactcttccgcgactactgcgaagacatgggcatcaaactctgcttctcctgacctgcacaccccataagcaatggccaagtgga

SEQ ID NO: 75804 - DNA, 396 bp, Oryza sativa
  unsure (1)..(396): unsure at all n locations
cacacataagtctgctgaagtcttttccttcgagaggaactgtaagtctgcacttttcagaacatcgtcacctgcaaatccttcaggaaactggtgtgtttgtgtcaaagtaacgttattcagatgttctgggtgttcatatgcagtcaatgatggagggaaatacatctctagtggatttccagccatttcgtcgaggatcatgtctggagttccattcagtggatcatgagatctcttcatcgaacgcggaacgtaggttgcaacgagatccggtgctgagaaagtcgatgaagatacaatttcatcatcacacatgatgctngatgttgtnggggctagcatttcctgatttgtgcaaaagatagcctctagtccctcacagccacttatgcg

SEQ ID NO: 75805 - DNA, 366 bp, Oryza sativa
  unsure (1)..(366): unsure at all n locations
gcttgagcttctccaatgcttctatgtacacttgaaaatgtgcactcagcacctaccttgacaaaaacacaagaaggcacatgctaaacagctgaagactcaaagatcatgaccaactaacttaacaactgatgcagcaaaggtctagtatattgcaatggatttgacagaagcacatagacatgaccaatttacccactgatacaagggtaatgcatcaagtactgatttgattatccttctttaatatgttggaattcacgattatctacaattttataaccaaaggatctcgctaattcaatatgttgttgcgatgcaaatgaatgcacagntctaaccattcacccacttgcaacacgctta

SEQ ID NO: 75806 - DNA, 358 bp, Oryza sativa
  unsure (1)..(358): unsure at all n locations
cttaccgtgagttgctggagctatgcagtcttattggttgcttcttanaatcaaaatgcaccagttaatgagaagaagtaattatagagatgtcactgcaactaccagatgagctgctggtagcacaagggcatgacagaaacaaaaagagggcaaaggcaaaagcagcatctcgtattttggcagatcttaaggtaagaatttgtaagaagagacaataagtgtacacacatatggggttggctagtgcctcgtagtgtaattgattggccggttgaatggcagcccaagtacaccttgagccttgatgtgttcatattgctagtttgaaaatagatgcttatttattctacaaact

SEQ ID NO: 75807 - DNA, 415 bp, Oryza sativa
  unsure (1)..(415): unsure at all n locations
acactcttgaagactcaagcctaagcgtagatacgacgaagatgttcaatgttccaagagttgtcgacaagtgtaccgncttcgcgctcgagtcgatatgaacctggtcgggtgacttcagagatgataaatggcccttcccatagaggagataactngtgccgatctcgtgtagtttgaattttcctcaaaaccagatcgccgactagaaaggcacgggagcgaacattgcgattatgataacatcgcagcccttgtaagtatctagccgactgaatcaaagctgcttcccgacttactctcattggtgcagagcattcactcggtcctctccgtagcgttcttcgccggaatttcgaaagcgcaaagactcgaattcaacttcactcggcaaaattgcttctccccatagaca

SEQ ID NO: 75808 - DNA, 391 bp, Oryza sativa
  unsure (1)..(391): unsure at all n locations
caccccattcttctttctcctgtgcatctcatgaattggttcgtgcaaaataacaacaccctncattatgtttctcccgggtaaaaaggccgtctgtgaaggtctaatgatcttttgagctactagagctactctatctgctagtaccttcgcgaaaattttgaagcttacattcaataagcagataggccggtattgttgaattttgttggcctccttatgtgtgggtggaagagttatgataccaaaattcaggctgtgtagtggcaattcttctttatgaaagtcattgaacatggccattaggtcctttttaatgacttcccaaaacacctgaaagaactctgcaggaaatccatcgtgacctggagccttgttgtgttccatttgg

SEQ ID NO: 75809 - DNA, 131 bp, Oryza sativa
gcactcatcggatacctatagagcacgagagtactgtcctcagggatccatatatgactgcttactgatagtgttgagatgagttgacaaaaacaatgtgcttaaactcccgcgtgccgggaatatttaat

SEQ ID NO: 75810 - DNA, 453 bp, Oryza sativa
  unsure (1)..(453): unsure at all n locations
agcttaaatgaacttgagagcaaaccttgaagagggaatgaaaatgtgttgaaatggggtggagttccctctcccagctggttggcttaagtagtgcacccacaacggtcaaaaccgaccagtggggcccactagccgttgcctcaaagagggaggcagccaaccattggcctggctggttcggccgaacccctggtgggcccaaccggccccactttcggtgctgggttacaacggtcagtgttgtcgtggcagtgaattttcgttgaaaattntattttggtttgctttgaaaaattcatttgaagaatttcctcanaattcaaaactcctaaatgcaacttcgaaattcaaacatgtgttgatgcaaaaattcaaattggtgaaaataaatatgcggatacaaaccaatttacttgttggtgaaggtcgcgtcattttaagtccgacgtg

SEQ ID NO: 75811 - DNA, 434 bp, Oryza sativa
  unsure (1)..(434): unsure at all n locations
agcttagccgatggaggtcactagagaggtggtgctcctcgagctgaaatgctacgacgacaaggatgaaccggtcgtgtcggctgctggaggagaactgcggcatgctcgaggtggcaatgagcacgaccaagggatggtgacagcagcgtgacgccctagtgccatacttcctccccctgatactgaaggagatgatgccggacctgcaggtcactggcgactagttctcctgcgaggcggaggcgatcaaggagtggttgcgcagcgggcacgtcacttcatcgatggctaacctagagtttccctaccacaagttcatcctcaaccatcctctctgcgacaccatccacgagtgtcgcctccaccgcgccatgcgaaacanagtggcccactagtggtcgcccttctccctatcactcattccccttctt

SEQ ID NO: 75812 - DNA, 315 bp, Oryza sativa
  unsure (1)..(315): unsure at all n locations
ccctgtttgtagccggcgtcctattacttctttacagacatnatgcatggaaactgtctggaatcattgagctgattagtggcatgttaaactcaataatactctgctcgaatctcggcactgatacagctatttagctggactaaaactgattctgttaaataanaacaactatttgctcaaatgctctgctcagtttgaatactacctggactcttgtggttgacttgctggagattccatcactggtcgtagatcgatatggcatgagtacatatcaatgggtgacttacatcatggtacagctatatttcg

SEQ ID NO: 75813 - DNA, 453 bp, Oryza sativa
  unsure (1)..(453): unsure at all n locations
agcttagctgggagtatactaccgagtgaagtgtatgaccaagatgtgtatgtgagtggtgatatactatatttatgcccttttatagatatatccaaatgataaatggtgagtatattttgaatttggagtatggtaattgcaggatgaatcagcttctaaagatacatatacaataaatatattgcaatcatcagaaataagctaaagataagtacaagacagatgaggcatgcacttgttactggatataccacctgaattgaaatgtgatactcctacgatataatttgctaatgtatagtaggggtcagggttntatctttcggtttagttgtttgtatcgcgggtggccgaaatagtaccgtccgaaattatattgaatttataaataaaattgatcaaatctgaacaaaatattactaaattgatgganaaaatataaaaaataaa

SEQ ID NO: 75814 - DNA, 360 bp, Oryza sativa
  unsure (1)..(360): unsure at all n locations
tatcttatagtgttatggcctatgctcactctttaataaagaattatatttacgcttccgcaagtgtagcttgtaatacaacaactttgntattgttgttattgtactccggcttcctgggacagggattaatacaattagtttttgggaatatggttgtatttctccgggcatgatgaaatttatcctacataaataagaaaacaaaatacccgaaagaaatcacgtatacttatataaaaaaagcatttgtcaaggtaaaactgtggaaagagtaccaacaactccggcactcctccagagctttccgtcacgctcttgccatattctaactctactagaaggttgcctaaatatgtg

SEQ ID NO: 75815 - DNA, 270 bp, Oryza sativa
  unsure (1)..(270): unsure at all n locations
tctaacctctaatatctatttcctatccccataccataatactacctctcaactgcaatgttcttctcaccccccactcaaaccccnctgctaagatccagaagtcaaaaaatctctcttatagatgccgacaangaataaggagcgacagttatctcagatcgattcgttggggtaatcgacatcgatccccacgagccgtcagttctacaccttctcgaagaccagtgctcatcgtcgacgagtacaccacgtgatgtatttgctatc

SEQ ID NO: 75816 - DNA, 388 bp, Oryza sativa
  unsure (1)..(388): unsure at all n locations
gcttgatatgcttatataaaatgatctatctatataggtggcgaatatacatgaaactagtagtgaaacatgtatattaagtaagatcggctgaaaccccgatactatccttattatgtttaattaaatgctagtttgcatggttctaagcacgactaaagatgatgcatctcaaagtatgaaaagaagcctacagtatagacaatcaagcaattaaacacttttcaggatggtagatgccttagctaatctaatctagcaagacaatttagccgagactagcataaaccctaaaagcagcagcagccaatagagcttaattgagaagctnagaatagattaacttagacatatgataacaatgactcgcgatatcgagcttaacacg

SEQ ID NO: 75817 - DNA, 404 bp, Oryza sativa
  unsure (1)..(404): unsure at all n locations
taaaactcaacctaacctgatccttttgctataggatctgtcctcagacaacaacaggatgaagtatctgttaatacatactcgaaacaatcagagtcttaaacatttttaatatgcattcctcctctaggcaatttgaaattccccagcagatgactctgtacgtttaaacactctgtctgactagtcatagcccccaagcatcgggagtcggcctaggcatttcccaaacatggatatgagtgacatgagttcgtcattaatggaacanagtttcacggatcagaatntactactcatgtacttntgcaattattaagagcagaaaataaattatattatctctatgctctngaattcttccgagtaatacttagcaccttgcgttactcggtccatccaac

SEQ ID NO: 75818 - DNA, 337 bp, Oryza sativa
cttaagtcacctgaggcatgcagcttataataactactggtaggggttgcgtgtgtgcgttcatagaagtgggtgtgtgcatgttgtgagcgtctatatttgtactgtgtttctcaaaaaaaaataacaaggttgattgagggagtaagtacaaagggcatttcacatagggaaataacagtataccctgattaaatacaaaatgtatcttagggaggaagaaaataatattataatccataaaccaaaatatgcagagcagcataaaatccacctctccgatgtcactgctttccaccaaatagatgttctgcactggagtcattctgcacaataa

SEQ ID NO: 75819 - DNA, 370 bp, Oryza sativa
  unsure (1)..(370): unsure at all n locations
gtatctccgatgagtgtaaacaccatccgaatgtgttagctcatttcgtctctcgcacttcgtgctctcccctcttcccccccatgttcctccaccaaaaggaaaggtggacaagagtatgacgatcaagaggccccaaggtcttagcaattttgttaaggccaaaagtatccttcctaatgattatgcttcacattgttcttttgatgcatcttatgttcttaggaagaatgctagtggtcgtgttgttgctaagtatgtaggcccaaggtgcaaaaatggttccatcaagagagttctntgggtgcctaaggcactngtcactaacatgagagggacccaagcagtggggtacctaaaactagaaatt

SEQ ID NO: 75820 - DNA, 423 bp, Oryza sativa
  unsure (1)..(423): unsure at all n locations
agcttattttcgtaggcgggtctggtaaacggccacgtctgtatatgctggcctataaaaaaacccgcctataaatatgacattcctactctattccctttcaatatgttcaaaaatggaagtcatcgtccttatctcctcgccttctctatgtcacctctcattttttcataccctctcaccttatctctctccccactcatttttctctcctctcccacttcctcctccactggcgggcgggtggtgtggcggcggtgggtangaagtgcagcatcaccgggcgggaggcttcttatctcctcctcctcaccgcctgcaagaaccggctgcggcagcattgtggataaccctttttgccatcggccgaatcacacagacccgatgcataaaaccgggctaagatatcttagtccggtaaaa

SEQ ID NO: 75821 - DNA, 445 bp, Oryza sativa
  unsure (1)..(445): unsure at all n locations
agcttcaacattgcgaaccgattgagttgaaaaacatctttgaatcatgcgctgataggttgctcctgcattcttcaatccaaagggcatggtgatgtagcagtaggccccaaagggcgtaataaacgaggtcttcaagcagccggactcttttagtcagatctgatgatatcccgagtaacagtccaagaagctgagtaactcgcagccggccgttgagtcaaccacctggtcaatgcgaggtaacccaaaagggtctttgggacaagatttgttgaggtcggtataatcgacacacatgcgccattgccccgtctttttccgaaccaggactatgttagccagccagtcgggatgaaggacttccttaatgaagcctgctgttaacagcttggntaattcctccttgattgatccttcctgtcctgncaaaacggcggagtcg

SEQ ID NO: 75822 - DNA, 269 bp, Oryza sativa
  unsure (1)..(269): unsure at all n locations
caaaactaatgattcagaaaccgacatgtntagactgtatcaagccctggatcagtagattgatacaagttcaataatctggatcgtctntgcatacgtctaggcatagctttgaaggagatattattatatgaagtaatagggtatttacaagattgtgtctaactattacagcacgaagcttagaatggactacctctgctggtttgtatagattaaactatctatcaatctataatgagagataagtagaatgaactaaccatatg

SEQ ID NO: 75823 - DNA, 308 bp, Oryza sativa
ctcgccgtggcaccttctgcgccagcgcgccggcatcagaagactcccgggcgtattcgtcaccgacgagagtcgcacacgccgcgctctcccgaagcccgaaccgatctctcttttggatcctccagtagccgtcgtagaagcaccccgacacacagagcaatgcgccggcgcccccaaccatgttcgcgatgaccacgttgtggatgtggagcgccgacacgcccatcacccacagcggcgcgaagcacagcatcatgaacgtgtgggtgtgcacgaacatgctgtcgaacccgagccgctccatg

SEQ ID NO: 75824 - DNA, 419 bp, Oryza sativa
  unsure (1)..(419): unsure at all n locations
agcttcttatcgaggcaacaatggcgagaggctcactctcacaaagagtagtaagtggaggaaaggtgaagcactcacacttgaaatgggggagagagaggcttgtccaggttttatagtactagccaaaatgccttttctttttccttttctttntcttttcattttgctttggctattaagtcacagctcaccttgatctgtttgtatgtgcatttttctttaattnttttgggggaaaaagttgataattttggcgtagtggagttaggtttgttttggcacacctgcgtaaataggtgtgggtgtgtttagttgcctgcacgagctatgcgaaaacgagtacctcagctttcctgattnntgtgcgcatttgtagccaaaggaacaaagaagctcatatcatgtagctccttgta

SEQ ID NO: 75825 - DNA, 336 bp, Oryza sativa
agctatataaaatcttgggagggtttaagaacatcttttttattaattgtgtgccgagtctctatgtactatttatagactaaattagattgaacctatccgagtaaaatatattgctattcaactaaacgtgactaatctgctaatgtattaatcatgacatagtcgttatattacatgtaatagtaccccatagtcttcaaaaatatataaattcaccttacggccaataactcgaacgactctaaaaagaattcatctgtgcgattaatataactaatatgggcactattaatctagggagactccattgcgtacaataacacatatattgag

SEQ ID NO: 75826 - DNA, 346 bp, Oryza sativa
  unsure (1)..(346): unsure at all n locations
cccagaggtgccttgagagtgtggagatgctcanagtgccatattccctcttgcttcacctccttctgccaagtgtccagtgacgggttcttcaggtagaaccggccataagcgccttgtgacactcgtaactaccagctggtgaaaaactcggctggatgggccagctactctgttgaccgaacgagggtncagccgaaccatggctggtgccaatcagcccataactcggcaggtgcactactcattgactccagcgacgggttcttcagggtagaccggtcataagtgcctggggacactgaaacttaccagctggtgaaaactcagctgatactcagctgat

SEQ ID NO: 75827 - DNA, 459 bp, Oryza sativa
  unsure (1)..(459): unsure at all n locations
agctngcaatgagcagagctgtggtgtcgacatggcagagcaaacaaattctaagaagaatggaatgtctggttggttggtagcacttattcttcttctagggcttggtgctattgggggcattgtatttacaagctacacttactacttgaggtatgcctaaatgttactatggtctttggattacattgtttctgcattcctccctgtttgtggattttgctcagtgtttatgccttcaagagttcttagggaactagaagctccgaacacaccctaggggttagtgatgatttgcatgcactccatatatagtcagtacacgattcataaatttgaaacaggagcttccaacaattttattntttttgttagtttccaatcataattaaatggtaaaccagttacttcaagatcaacaacgtccatttatgctggttattcagtcattctctattt

SEQ ID NO: 75828 - DNA, 303 bp, Oryza sativa
  unsure (1)..(303): unsure at all n locations
aaccagaccgtacagcgtccacgcgacagggcatatccagcagtaccatctccaccagaatggaactntctgagcacatgggtcaggggaatggaaatgagctatagaaatgatgaaacgaaattaaaggcagggtcataaggatgacgacggttaccggtctggggatgatgaacccggagaataggttccagatgccatagaaagccgatgagacgaatgaggcgacgtggtagcttggtgtcatgcccacagccatcatgccatagaatgtgaagtatagaaacgtgaagaacatgaaga

SEQ ID NO: 75829 - DNA, 456 bp, Oryza sativa
  unsure (1)..(456): unsure at all n locations
agcttctgattgcagggagttgcgtggactgacgtgctggcagctgtgtttctcggttctgggcacttgtcggcgaaatgacccattccttgacaattgaagcaacagatatcttcccggactcggcattttcttttctcattatgattcctctgtcctggcactggttttaagctgagactgtaatcttggcgaggattggtgttgccttgatgcttctctccgttggaactggcgggttggttagccatctgcttcgtcagcagaaaactgaattgacaatcttttggtatatgatcagttccttcacaaaagaaacaagtgatcctgctcgttggacacctgtcgggtggatggtcttcctcacaatgaacgcatatagtggcacacgagctggcgaccgatntctccacaacgagaagcatgccttacgtccatttcatcttcatcatctga

SEQ ID NO: 75830 - DNA, 304 bp, Oryza sativa
  unsure (1)..(304): unsure at all n locations
ctcccccctactcctttaaagtccatgttccagttcctgatagcccagtatgctctgtgctcaagttctacaaggagtcgatgttggtatttcttaacgacattacaagaaatataattcccagcaatggcgcataaatactcctggtatattatggttacagagttcatccgcaagcgcacagatataccattgtagcatttcacccgagagtattccaagggtatagtatnntatttatcccgtgggaagatcatgtagagaaaactcgactaataatttatatattacttgtgataatcat

SEQ ID NO: 75831 - DNA, 378 bp, Oryza sativa
  unsure (1)..(378): unsure at all n locations
agcttgccgntcttcttgatgaccgggactatgtttgaaacccactcagtgtatcggcactgcctgataaagccaacatcatacaatcgagttacttcggccttgatagcatcatacatatcggcgttgcatctccttggaggttgttgataaggattgtaccctggtttgataggaagccgatgttcaacaatcgatcggctgagtcctagcatctcgtaatactccaaagcaaagcaatctctatactctctcaaaagctctatcaacttggttctgaactctgccaataaattcttgttgataaatgtcggccttggcctatcttctgggcctatgtcaatatcttctaaaccatcagccgacatgaaaccctgt

SEQ ID NO: 75832 - DNA, 425 bp, Oryza sativa
  unsure (1)..(425): unsure at all n locations
aataaccaacactactttgtatttcgcaggataggatctaaagacgggttaagaatcacatgaatgaatgagctactcctattgaatgaaacataaatcagcttatttctcggtttncncaggcaaaggaagtcaagctgacagccataaaaggtctgaaccgtttgagaggacatagctacatatctntgaacttgatttgttttagctttatgcattttgcccacagatcgtaaggatattgttctggtcatgctcacggacattgtgcacacatgcagagtgcgtatagcaggcgggagaaagtcaaggggaattagttgctatctttgaaagaagggattgttnntctttaattagagaatatgttaggggcgtcctataagagcatgttcaatgatagagcctagtatggtcataactag

SEQ ID NO: 75833 - DNA, 452 bp, Oryza sativa
  unsure (1)..(452): unsure at all n locations
agcttcatatgcgatggatgtcatgtntatgcaaagagtcaagtatattgtcgggtggatgtgtcacattcatctaaaatcacttatattatgggacggagcaagtataaaaatactagtaactgctaaagctcagctataattggttaagttatggcttatcgatcagtcctagaaaaataaacgaatatagtcaagtattcgattaactaaacccttaaaatctaaaaataacttaaaaagttaaattttgcgcccaataagtcaacaagcatagatgacgagatgttatgctagtcaagttattaaggttgtgctcggtactggaagttgggaactaatgcctcctacacgcaatggagctacttagcacatgatncaataactattagctactcagcaatcatcacacacaacggagtattcgttagaaatggataatatgactatta

SEQ ID NO: 75834 - DNA, 456 bp, Oryza sativa
  unsure (1)..(456): unsure at all n locations
tttcatactagacttgtcacatcgtctaaataacagtccgtggagaaaaaatacctgcgagtatataagatctggtttcataatctaaagggaaaagattatgggatacacgaagaacnccggtattcgtaacaagcatgggtaagagttggtgtgtaatcaatgcgaaggatacaactgagaaaaaaatgaatccaatatgtgaccagctntgacgctccatcgcaatatcaaatcccatgtatatgaacctgtgtaaatgcattacagtttcagtattgggacttggttaaatattgcacttgaaggtcttgcttacacganagcctctgctagtgatgaaagtagatgganaaaacgagctggtaaacgctgagaatcttcttgatagtatagaaggtgatctcttataacctgaatannaatcacttctggtagcatgttataatatcttct

SEQ ID NO: 75835 - DNA, 447 bp, Oryza sativa
  unsure (1)..(447): unsure at all n locations
agcttagtcaacgtgagacccatgctgaccccacatgtcagtgactagcactttcttctcctctctatcttccctcttcttgcctaggaccttgggtgatccggttatataaattgagggaccaactaatatttcggtttagggatgaagttcaaattcgacgataaattgagggacaaaatgaacttattcttacaaaatttgcatcccaaaacggcatatcaaatgtcgggccagtaacaacccgtcaacaaaaaattgatcgacataaggaaaacgaaaagaaaacaaaatccaatttgtgtccctctcaactatagatcgagttacatttgcatttcttaactataataaaactaggtatagaacgtctcccaactactaaaatntgtgtaaattgaatccctcgatggtttgaacaacggttccgtcctacgttacacccat

SEQ ID NO: 75836 - DNA, 187 bp, Oryza sativa
caccaacgaccagcgggaagggagaccgatggatctggccgtcagtgaggcgtgagcgccaccggcacgctagctacgaagacagtgacggcgctccgcaaactctcctctagttccctccgccgcctgccaactgctgccacattcgcccgtcgccgctccgctgctgctccgctcgcaccccgct

SEQ ID NO: 75837 - DNA, 302 bp, Oryza sativa
cagcttctctcaggatatccgtcccgaacacttggctttctccgacttggtcccacaatagcggtgtccggcatttgcgcccatacaacgcttcataaggtgccatttgtatgctggcttgatagctgatattggaggagaactcagcataggggagactcttatcccaggtcttcccgaaatctatgacacatgcgcggagcatatcttctaaaatctgattcagacgttcggtctgtccatctgtctgcgggtgatatgcggtgctgaaattaaatcgggtaccaagctcttcttggagc

SEQ ID NO: 75838 - DNA, 455 bp, Oryza sativa
  unsure (1)..(455): unsure at all n locations
agcttatgaagtttactttcaaatggatttcgtcccacgtcaaaactcccaccaagctatcggaaatctacaaaacaagctacatacctcatctagttcgaatctgatttgggtcttaggctaagcccaatggggtgtgcaccctagggtaaccctaggatatccttaatcatatttattcagtagccgtcatagtttagaatcgggttttgcttagattaatttgttaagaacaatttcactgctagatcggtttgtgaaaccctaaatttgagtgcttaatcattcatatgcaagtgtgttgcaatctatcttgttcttacttgtgttctttgattcgcatgcagggattagccttctcagtgatgtcaaccggatttcggtacagctgataaccaggggagaagtagtgctgcgaatggtagggttagatcgtgtngatcggaagccggatc

SEQ ID NO: 75839 - DNA, 242 bp, Oryza sativa
  unsure (1)..(242): unsure at all n locations
tataacaagcacttcttgtatttaggtcatcctgtcttgttctgcaattgaaaactctataaaccctttcactgttntgccttttccatcgaatacctgttacatagtaaaaagaaaaagccaaggcagaaagggataattagacagtctgcgatggatagtatcgttgactccatccccacctcgggcttgttccatcaagaaggtagacccgcgttcgggccacggaacctaagtagcga

SEQ ID NO: 75840 - DNA, 373 bp, Oryza sativa
agcttcgcagaaccctcattgatggcggcagcgcactcaatatcctctgtgccaagaccttggatgatatgcagattcctcgctccgagctgaagccgagcaatgcgccttttcacggagtaattccaggattatccgcaactccactcggccagatcactcttccggtcactttcggcactcgggaaaacttccgcacagagaatatcagctttgaagttgccgatttcgagacagcataccatgccatactcggacgcccggcgttagccaagttcatggccgtcccgcactacacgtacatgatgatgaagatgcctggtccccgtggagttctatccctacggagcgacatcaagcaagccgtcacatg

SEQ ID NO: 75841 - DNA, 246 bp, Oryza sativa
  unsure (1)..(246): unsure at all n locations
tagagttatgttttattgttaatctagaatgtgtcgtgtatctaccatctcttatagatcttcacatcttgcttagatctcatagttgtctttatgcttaatgctacatcggttgagttcgatctattgagtagtatttataattatgatatctggctgggtttatgatcatctagagagatagtatcgggggttcagccgatcttacctgatctagtcttatgacttacatgcttgntngatatg

SEQ ID NO: 75842 - DNA, 399 bp, Oryza sativa
  unsure (1)..(399): unsure at all n locations
agcttctttatgttcgttatgtatgcagatatataattgtaagctcatgatattcttctgtgataagtcagtaatatgctttgctgaggaatcaaacatttctcaattgcctggaaaaatagataataagctctaatgccaccccttcaatatggcattagtttatgattatatggataaaaaggtcaataatgatttaatgtatgtaaaatatgacatatccatatagcacatactactcactagatagtctcaattaggtaagttgaaatttgactttcttgaatctgttccatcaaagcttaattnggtttgatcaatttgatgcaggtcaagaaccaattgcatatcttggtccaaagaaatggagcgcagctcgaactggaacacacagcatgt

SEQ ID NO: 75843 - DNA, 445 bp, Oryza sativa
  unsure (1)..(445): unsure at all n locations
agctnttcctgttcagcccaatggctgaacaagcaaatgcgcacaacctctctccgagtgttagcggtgacgacggngagccaaacccacgccgtcgagctcgtactccaccgccccctccacgccaaagtcctaggcgggaggaggcgctcgagagggtcgaaggatctgcgacttcgacatccacgggtgatggggaagtgcggcgagatggggagcgtcttctcctcgtctacggcgacggcagcacgccccagggcgcgctccaagctgcgggcgcgctcctacgtcacccgcccattgtccctgacccggagtctccagcccaacgttggctggacgacgtggccaacttggtcatgacggcacggcagcgcctangtgctggtgggcggtcctccgccaccaagacctctggcgctgctaccaccggctccgtgtcgtc

SEQ ID NO: 75844 - DNA, 499 bp, Oryza sativa
  unsure (1)..(499): unsure at all n locations
ttgactatgattgttgtttcccaattataataatacattattacctcattgcatgtgttgataccaaataaatttaagttgaccattacatcaataacagtctctactccctctgtttccttttgataagttcgttgatagaagaaataatagtccgttccccaaaaataaacatattatgtgagatttaataaaaataataatgtgatattttagatgttgctaaatatttctgtaaacttgatcaaatctaataaaatntaatcaggaaaatagtcaaacgacttataatatgaattagagggagtataaaactaacgagaaacgattcagagaaaanttgtacataggtatatcttttgtgaaatatattagagtttctcaaagaccatgggtaattataaaaaaaatatntacaaaacggacanctaccattggtagatataananaaatatttacgaaacggacaggaaacggacactacgtaagaaactatat

SEQ ID NO: 75845 - DNA, 274 bp, Oryza sativa
  unsure (1)..(274): unsure at all n locations
agctntntttcgaagggtggtttatattntactaaaatnttgaaaaatccatacataatatttgaaacattcaaattaaatttgaaactctctattaaaaattaaaattcataccctaaatttaaaactttcaactcaaaatttgaacttttcaagtcgaatcaaaactttcaaatcgaaataccgaactttcagtctaaatttgaaaactttccactcaaaatttaaaaactttcaacctcaaattgtgaaacttttaactcaatatttgata

SEQ ID NO: 75846 - DNA, 268 bp, Oryza sativa
  unsure (1)..(268): unsure at all n locations
aacaattgatacccatgctatcggcaaactgaacaaactcatcggacacgaagaatgaaccttgatcgggtgtaatggtttgaggaataccaaatcgatagattatatgttcttgaacaaattgtatagcatcctcagaatcaaccttcttcaaaggaatcgcctctatccactnggtaaaataatcggtcgccaccaatataaacttatgccctntactggacggtgggataatcatgccgatcatatcaaattccccaccctcgaa

SEQ ID NO: 75847 - DNA, 432 bp, Oryza sativa
agcttcctaaagataggtacacttaacactctagtatttataactctcgttggtttatgagttgcttgtgcttcagtgagtatctcttcttcctttcctgctgattaacattgcaacttatgcatgaatcattgatggtatccttaagatttattgatatactgcttgacaccagatgcatggatagctggttagattcaaatcacacatagacaaaaaaacatccctgctacttccctaggcatgatttgctgtcctagttccatttcattaaagtggtacttcatggtaacatccttctgcaggtatttcatgccaaagccttcctttgaggtgaccattgaagatggattattcaaatgcacattgacgctacctcgaaatgcagcatttcaaagtatagttggccctttaagcagttcaaagtaatta

SEQ ID NO: 75848 - DNA, 303 bp, Oryza sativa
  unsure (1)..(303): unsure at all n locations
ccccagaagcagatagacatgaccaatttacccactgatacaagggtaatgcatcaagtactgattngattatccttctttaatatgttggaattcacgattatctacnaatttagaaccaaaggatctcgttaatccaatatgttgttgtgatgcaaatgaatgcacagttctaacaattcaccaacttgtaacaggcttatgatcgtactagtagaatagatgaacggtgtactttagaagtctncttacatcactntcatttgacacatngataccaagcagaaaagagcagcgaacata

SEQ ID NO: 75849 - DNA, 452 bp, Oryza sativa
  unsure (1)..(452): unsure at all n locations
agcttaaccatctcgtcagagattccaaaaaatattaagatgtagggaaatatntttgggctaccgctagacaagctcttaatctataatatttttaaagactctgtgatggtggttatgccataccctgtaagtttaagtgccttaatttggttttgttgattaatgacaaatctaattatatgagactaacaatnttatgagctnttgtttgactagtctcatttggatatgaaagtaaaaatgatgagatgtatgtattaaacttcacatattctaacttggtctctcttgtggatccaaaatatagtgtgagctctctcattgatcttgattgattatgtgcatatgtgttcctttatatccatatgtatgcacatcttgagggggagggtattctatattttgtttattataagaaatccatcttgatttaaatcatctttatctca

SEQ ID NO: 75850 - DNA, 490 bp, Oryza sativa
  unsure (1)..(490): unsure at all n locations
tcactaggttctattactttttataacatcatctgctgtctttatagtacctatatggcatgtgtggaatatggattatggaacatgtatgccaccctccaaatataactgtgaatcatagctatccattcatctcagctcagttgctcccaccttccattcatttccatttctcaatcccaccctttataacccatttatccaaacgcaccgttatagtttagtctaacatagtaacatgtttatatgataaccataggcgctgaaaataccatntaacaaacattccttntataaaatattccatggtaataagatctctctntagtgaattaaggcgctacattattgtataataactgagggatactgtcttaagaatggagaaaacaaaatagaaagtagcaaggtattagggcacttcctctgggtctcagtcacattntggtattataaatcatggaaccagtttgaatagcttgtataatct

SEQ ID NO: 75851 - DNA, 452 bp, Oryza sativa
  unsure (1)..(452): unsure at all n locations
gctntccaggtatgaattattcaaaatggtgtttaaagcgacctgcaaacactccactaagaaatgccttctcaaattccctaaaatatcatacttgtgaatgcagcatcgctttctgttgataaactgacactgagattaaaaatttactattttcaacagcgttctgttgctgtttttctgtaacttgtactcttccaaatcttaatgaaattactcggcctccttcggccagcccgcccaanaaaaagagagagattaaaaacctgtcctctttttgcataactgtgaatcctatagaccattaggagctccaaagagcaggacanaataaaaaagagagagaatatgaaagagcccttatctctgacaagagaacatactgttctgaaaatcatatgacttgcaatatatttaatgtatagcanagcaatgccataaccacacttaat

SEQ ID NO: 75852 - DNA, 297 bp, Oryza sativa
  unsure (1)..(297): unsure at all n locations
accccctggttatagcatcactgaaacggccatttaagatttcagagaaaatgatatagtagtagtatggagcaccatatgaataccacacctaagtttgcagacatttaatactaaccaaaaagctggtaataccaaacaaaccactcacagaggaggatggttgaaatcacaacaatgcaagctcatcgttntgcttatgctgattataaaccataacggtttatcaatgantaaaaanaatattgtagtaaacccttttatacatgtgttcttagccgattataagtaaatgct

SEQ ID NO: 75853 - DNA, 454 bp, Oryza sativa
  unsure (1)..(454): unsure at all n locations
agctngccgttcttcttgatgactggcactatgtttgaaacccactcggcgtatcggcatggtctgataaagccagcatcgtataatctagttacctcagccttgatagcatcatacatatcggccttacatctccttggaggttgctagtgcggtttgaatcctggcttgataggtagccgatgttcaataatcgatcggcttagtcctggcatctcataatactcccaagcaaagcaatctctatattccttcaatagctctattaacttggctctgaactctgccgataaattcttactgataaatgttggccttggcctatcccctggaccaatatcaacttcttccaaatcatcagccgacatgaaaacttgtccttgcttgtcatcgagatcatctaccgtgtccttggtgtagacgtntgaaccctccacgacgcactcaaaataat

SEQ ID NO: 75854 - DNA, 323 bp, Oryza sativa
  unsure (1)..(323): unsure at all n locations
cacttcacgagaatcaaaataggaagaaagaaagtatggcctatactactctatggatagagttctcaaattgatagagaaagcaccgtaaagatcaattagtgaccgactgggtcgatacaactaanaaaaactgcttacttatcccatgatatggngcaaaatttaggaatccgcttatgtaatagagccgatccactaagggattaagcagcggtgtagtatcagatcccaaagatagtaagttctnttttcttgcttatggggaaaaagtctntntcagggatctatagaaattcatatatgaaacccgagatagtacc

SEQ ID NO: 75855 - DNA, 439 bp, Oryza sativa
  unsure (1)..(439): unsure at all n locations
agcttgaatgctgtgaataaagaaatttccaaagtattgggcatacgccatgcgcacactgctttaacagatgtgcttaagtccctaaaagacacatggtttcaccacacctggaaatatatggcatatatggtataacattcgagtaagtaaactcataaaggatttaccaaccgcctgaaaaatgaccataatatataatcagcctaagccataatattggtcaataaaaatgcacacatacgtggcaaaaagcaatgatattgtatccaatcaattgcttgataaacccaaacagcgccatgactatataaaaaagtcagcgggacagctatataaagctntactgtttgacaccttntaagatgcattgtaccaactcctataaagtcgagtaactgcggtataaaaggaatttaaggtattgngcacttgatca

SEQ ID NO: 75856 - DNA, 139 bp, Oryza sativa
ttcccccctaggttaatctctattgtggctcgactaacacatgcattcattagcagggggcgacgatgcctggatggaatctgttgtcgaccagggtagtggtaatcatcagctccgtggcacatctcgggctcgtctt

SEQ ID NO: 75857 - DNA, 440 bp, Oryza sativa
  unsure (1)..(440): unsure at all n locations
agcttatcttatggttatggcaatatttttgtttcaatattccggatttaggttttggttaaataattcaagttccatgcttgccatggatgtacaatatggttttaatttggttctttgttccggtttcaattattcatgttccatgtgagttatggatgtgctatatggtttttattcatgttcctgtgggtaagcgctgatcacgcttactcggctntgccagcaaatgctaggatatattcacaattgtccgggatggaaactactatttcaattcatgtttgcccgggatgggaactactattttctttaacttagtgtttggaaatgtgttccttttcaaagaaagaaaagtgtctatgcaagntctatttcctatcatgtatgtatatgttttctagntctatattatactcgctgagtattttatactcact

SEQ ID NO: 75858 - DNA, 250 bp, Oryza sativa
  unsure (1)..(250): unsure at all n locations
ccaagttttttatattccagatccatctaagttaagggtgaaanagggtcgacgccaaactagacgcatcagaaatgatatggatgagtcagaagcaggtgggaggactntacgctgcagcaagtgtgatctgcgcgggcatacttacaagaaatgcccgaagaatgcagaagttccaagcggcgcagatgctagtccatctggacaggcaagtgatggtaggcgaccacctggtgaatgaacaacaagc

SEQ ID NO: 75859 - DNA, 396 bp, Oryza sativa
  unsure (1)..(396): unsure at all n locations
agctntatccttctgagtcgaatttaatctcctctggtaaaactgcctcatgtccataaacaagcttataaggaggaagttgaatcgatccatggcaagccattcgataagaccataatgctttagctaatcttgtatgccattgccgaggataatcagaactttttctcttaattaatttgatcaaacttttattagatgcctcggcttgcccattagcttgtgcgtaatatggagaagaattcaacaacttgatacccataccattggcaaactgaacaaattcatcggacacaaagattgaaccttgatctgttgttatggtccaagggataccaaatcggtagatgatatgttccttgacaaattgtatagcatcccctaaatcaacctttt

SEQ ID NO: 75860 - DNA, 324 bp, Oryza sativa
  unsure (1)..(324): unsure at all n locations
attttaaaggcactggttcatgtacttagatagtcccaaaacttatgagccaaaccaaagtctaaactgtantttggtgaatggtacaataacgtatgacagcccaactggatatacacaatgctgttggtttcatgcatagtttctatgtacttccatccatcttttcctgctccttccattgctgtggttttcaccatatntntgtactttgagttcagtaagcttcatgatcgcgggtgtacttgcactattaagggtttcagtacaacttgaactgagtagtgaccctattatcattattaaatacaattgtgcactgag

SEQ ID NO: 75861 - DNA, 448 bp, Oryza sativa
  unsure (1)..(448): unsure at all n locations
agcttacacgcctaaaatcgaatctcccttcctttcctattgcttgtcaactggntcatctacgtgtgctgcgatcgaaaacttagtcaataaggaattaatagagcatgcataatagatatatagataattaattaatggatgtccaagtcgatctgctgctttaataaagagcatgatgtatacatgtgtttgcattggtatttgcaaacactattagaaaacgatttttccaaagaagctggtttcatttctaaaagtgaataatagaaaaattctcttgtgataatgacaagtagtcttgtggtctaaaatcacatgaaaaaatgttttttttgcatacagttatcttaagacaccgcatctaaaaatgtaaggctggacaaactttatataaaaattatagccctggaaagactacaactntgaagttgaatttttttatttc

SEQ ID NO: 75862 - DNA, 242 bp, Oryza sativa
  unsure (1)..(242): unsure at all n locations
ttcctaaattaaaatcctgtatgaaatgtttatgacaaatattacataaaaaaattatgacagaacttcatcttagtttaaattntgtgcctgctatttatgaagatcgtaatggctgactagaagttacgttgcccgttcagtgcaagacaagttccacaagtagttcccataatatcannaattcaacggcacacgggtcaaattctggtttgacgcatttctgacgctctctctctctc

SEQ ID NO: 75863 - DNA, 452 bp, Oryza sativa
  unsure (1)..(452): unsure at all n locations
agcttgactnggtgtgaggaggctggtttagcgatgtctgccctgctaaaccaaaggaaggggcttctttggcatatacccatggacaattcagggcatagtgtccttgttctctacaatcgtgacaaaaggggacatcctcttctggcattggaagctcattgacctgngtggcaaatgctcgatcaaacacatactgattttggtcttgacttccaaccaatggtagctgtgaactaagcagcatgcttggaatggaccaagggtgtgccctcgttaactctcttgaggacagtggtggattgagttgaaaacttgagtacttgaggcatacccgctgacattctttcctntttctctgttaaacatctgtgacagggattgaggtgagagaggaaacaagccaggatagaatagaccagaactagagacaggaccttaaaggaactaac

SEQ ID NO: 75864 - DNA, 234 bp, Oryza sativa
ctcggaccctcaccaaacattaagcatgctcgggacagtgctttcatttgcaattcaagagtctgactgccaaggggttgcattggtgtcatacttcaaaagacgatagaagagatcattcaaagctttcgggcccacggtgactggtctgaaatacacaatagaggtaatgagcttcacgataggatggcaacttgaatctagacaagaacatatgggacagatgaaatatga

SEQ ID NO: 75865 - DNA, 462 bp, Oryza sativa
  unsure (1)..(462): unsure at all n locations
agctttctagattccaatccgtgttttcgagagatattggagaacaacttaggcatacgctngccgaccttttactggacatcacaatggccggaagaacccgacgtccccacatgcgaggaaagcaatggtagagcggtggccggtggacgatggcaagaggaggcactgccgcttcttgccgccgccggctgcggcgcanggcgtggagaaggcgaccgcggagtccgcgcgctcgatgcggagctcggcgacgaggtgcaggttgcggctgtacccgtggtcggcgaggtgggcgagcacggcgtcgtcagcgggcgtcatccggtgcggtggagaggaggagaacggtgagaggatggngaagaccgatagattgatgggaggatggacaaagtgacgggagtgggatatgtccatatttaaaattttacagtggcctatattaaataacgggaatag

SEQ ID NO: 75866 - DNA, 358 bp, Oryza sativa
  unsure (1)..(358): unsure at all n locations
tgcacttgcaccccccttcgctcaccaaatcctcgaatctcacccgctggccccggccgaactctcaaaggggggcctcacagcctcccgctagagagggtcacccctcgacaaacgtagtttctttttcaacattggctttcaagttaccaagaacacatttataaaagttntacctacaaattcatttttatttcctaataagccggtttggcttattaggaaataagccaaacgatggggacgttgttggctacgtactctccgtatgcccctgtggctgtgggtgacatgccacactctcgatggacggattgaaacgacgaccacacccaactatgtgagagtaagaacatgg

SEQ ID NO: 75867 - DNA, 461 bp, Oryza sativa
  unsure (1)..(461): unsure at all n locations
agctntggaaggatgacgatagcaccatggacggtagcccttagccaattgatgtgagcatgccagaggagtgtgcctcgttgccctgttatagtgaaattatagagaaagctgcttcctggctgtattgggcactgtgttatgtaagctggcccatcgtaccaccctgtccggatctgccttaccccgtgcctgattagtatgacatgcttgtttatcaagttattcaccaagtgtatttttgttgcataaatgggaacaataactagcacatttctgttttctgttcaacagagaggatctaatgcaagctatacatactttntaccttttaactaacacagcatgatattctccttttctttntgggtacttacagagagcanaggagccttgaggtggtgattcaaatgtgtgcanatacacgtggagtnaagcatatgcatggagtagccatggct

SEQ ID NO: 75868 - DNA, 449 bp, Oryza sativa
  unsure (1)..(449): unsure at all n locations
agcttgaacaatattcaatcaaaacaatgtgctatgtnttttttttcaaaactaaaacaatttgctagttagcaagttttgtagaggctagtgaatcatatgctgtttttttatgcttgtctgaatgtcattattttgactggtgcatgcagctcactattcttaatatccttcttagctaacatttcgagcgaagcccaattgtcaattaggcaaaacgacctaacggaagcagtttagaaaacttcccttaatcccatactttaaaagatcaatattatatccgcggaggcatgcacaagtctaactatagaaataaaaaaatgacatgcttagaagcattgtcttacaaacaattattcatgtcattgtctcagtgacgaacaaatgtacaaccaacgcggaacttgtaaacaaatcaactttcattcatctttcataaagctgac

SEQ ID NO: 75869 - DNA, 317 bp, Oryza sativa
  unsure (1)..(317): unsure at all n locations
cgtcctgatgcactgcaccaacgctccttgtccgtcacgagcttgagcggatcatgctcaccgcccccccggcaccagcaccggcgtcgtcgccgacatcggctccgggcttccccccgtcgtcgcgctccgcgctgacatggacgccctccccgtccaggtcccacctcttcccctttctctgatttcggtctgggtgattgatgaatggttgtattagcttgtaggatgcggagcagcttctgatcgctcatgctttggtttagttcgtagttccactctaaatcgctcggtntgagggatggattagtactatg

SEQ ID NO: 75870 - DNA, 458 bp, Oryza sativa
  unsure (1)..(458): unsure at all n locations
agctggctccttcaacagatcacctaccaaatgcagttataatgggttacttttatattgacaatggagaacgcgtagcaaacaccacaatcagtaagaacataatagaagtctcgatgcctcccacgtctaatgttaaagaaacaacaaatctatgcatccttggactatcagttcctacctctagttagcagcaagcccatgttgggtcatgaagggcatttttcatgtccctactattgaaggaacaacaagtctatacatccttgaactatcagttgttcctcagcccctagttagctatatgagtttcagactcagtttcagcaacaatccagcaattaatgtaggactagtgtttcccagtctcccagatcctagcaatgactggtgtcaacatattgtgcttggttcactagtaaatntacattgctgaacactggtagatgaggagatgt

SEQ ID NO: 75871 - DNA, 327 bp, Oryza sativa
  unsure (1)..(327): unsure at all n locations
gtgaaaccgcttataccgaaaaatctacgtacgtacacacaattgaaaaaaaacagaaactttaggtactgtttatttaaaaaaaaacgaacgtacatatgcgaagacaaaaccaagaaaaaaatgtacttatgcgtagacaaaaaaacagatggttttttaaaatagtattttctatagtagaaaaacaaaacttattacttcacaaatatggtaaaaaaacgtacaataaaaaatatatgattngaaaatatatgttntcagctacgcgggcattctttaaaaagttgatctaacaatatatacagtgactggacttattataca

SEQ ID NO: 75872 - DNA, 454 bp, Oryza sativa
  unsure (1)..(454): unsure at all n locations
agcttcatcatgtctgttcacaaagtagtcattgcacttcatgaacgtaaatgatactatggccatcactggaagcttacgaacaccaactagcacgctattgaactgttcggctatgttggttgtcatgtaaccccaccggcggccatttctatcgtatgcacgagaccacttatctttatccaacaactcatcttcaagccgtttacgaggaccttcgggaatacgctgccttagtgcctcaacatccctctcaaatatccacttctcgtcaatctgacatatccttaggagctcttttgtctggtgcttgtccgcaccggccttgtggaaattagcactgaagtgcctcatgcaccatcggtggtgaaccggtggcaatcctgaaacaggagtcgtcatggcattcattataccagcatgtcgatctgagataatacanacctccctatgc

SEQ ID NO: 75873 - DNA, 215 bp, Oryza sativa
  unsure (1)..(215): unsure at all n locations
tatctgaaaatggttccgttggagcatgaccaatatgagaggagctgttntctttttttgaaaatattttgattgactcaaagttgttgaagcaagaatcacaaaagaagaaagattntattcacttgacaccggaccattagctntctccgtagctaagatntctttggattaaggctgcgttctaaatactagtacatcanaagagaaacacg

SEQ ID NO: 75874 - DNA, 424 bp, Oryza sativa
  unsure (1)..(424): unsure at all n locations
agcttccttggctgaatngagcaataataatgatatggaactgttatctttggagtgggcaaatcaacataataggattaatgagcgaattcttgatacagttgttccttacaaacgtattaagcatttaagaatttctggttataagggtgttttgcctccactgtggattcgaaggaaagtccttaccaaattggtacgcttgaagattgttggatgtcctaaatgggatgatctcccttccttcgcgagtctatctagtctgaagcatgtcttactggaggacctaccaaatctgaaatgcattgggggacctgatggtgatggattgcctcctttcttggttaccttagttgtaaaagaatgcctagaactgttgaatttacctcatctaccttatagtctaaagcatctggggataaat

SEQ ID NO: 75875 - DNA, 453 bp, Oryza sativa
  unsure (1)..(453): unsure at all n locations
agcttgccatctgcagatgaagcagataagaggaaaaatcaggcatattcattcaaaagacaaaaaggatagtttaaaggtaagaactatcattgaaggtcaaattcttcagcatatgtagaactctgactatccattatgacacatgtataactaaagcattattgccaaaattacaagtgattacatgcaaaaacacaaggttatgtaccttcatgtcccctgctctcctcccaaatttctgggtaagcagaggcaaggtgtcgatcatcccctttggttccggaggtggccgtccaatttcagcgaatgcttcccttattctggccaagtcaaaccttacgatgttgtgaccagcccagacacgcnctattgagaactctcaaggttagaacattatcaaaccaactaatatatggcagctatttatgctagctatacacanagacagcg

SEQ ID NO: 75876 - DNA, 150 bp, Oryza sativa
gagctagctattcacatacttcaagataaatacaataaatatatatgtgaaagatagagagaggaggagaaagaaaaaagagataaccttatagctcagctactatacatgttaactctaatataagttataagttaatagttggctcta

SEQ ID NO: 75877 - DNA, 466 bp, Oryza sativa
  unsure (1)..(466): unsure at all n locations
ttagagcgacctgcggcatgcaagcttagggattaggcgaacacatagatgcatgcttagtacattattcaanaatcgaccaacagcatgccactcaagaacatatatagtgtaaatacttcggcttacgccaatccagtaaaaaaatagtaaataacgatacaccaataaacagacatgagagaacaacatatataatgttggaagcatatacatgatacataccgtaaatattggaaaaatccctaggatgctctagtggaaaacattggataagttcatacgcctgtggagaaatgagcacaaaatccaacaaatttgatgatccaatatgcgagcaaccacaactggcacggtacctaaaaagatggaaccatgcatttaagcattttactgaacgaactcgaaagtaacaacaatgaccatctaaacatatgtaggtgcatntatccatgtagggcattta

SEQ ID NO: 75878 - DNA, 287 bp, Oryza sativa
ttcgtgctggcagaatacaccgtaccaaatgatcaacggattccagtttgcagcaggcaagcaaaagggcaagcagaagtgcgccctttacccaattgcattatgcgattattcttttgcaaagaagaagaaccaacatgatctagcatcgtgcggtgcattattagagcaacgcgcgtcgtctgccaccgatcgcactggaggacagctaaaacataagaagaactattatgcatagtcaagaacaaacgaagtagatagatctgtagctagggtagcacacacat

SEQ ID NO: 75879 - DNA, 432 bp, Oryza sativa
agcttaagtcatcagagattaatgggatcttctgcgccttgagctgcatgcacagtggcaaattggctcatcagatcacagtgatcaatcgaattggtgtctatatagctagctgaagtgctgaacgtacaatatatgtgtgcacactgtctgcatatattggtccacgtacgcatccaaatatgcagcaacacgcagaacattgcactgcaggtagatagctagggaccatatgcatgcatgaagccgttgtggaagaggagaaggggacatgtacatctgacaatattatgttccccaaagtcctatggtaatctatagaatgatactggttttcacaccggtcagtttatctctattatcaaaacgtcaacaaacgtgtgtatgtatccatatattttctgcatttaactgggaagaacattaagaaag

SEQ ID NO: 75880 - DNA, 280 bp, Oryza sativa
  unsure (1)..(280): unsure at all n locations
aactggtcgactcaacagccggttgtgagctattgagctntctcgacgcttactccggctaccaccaaatcagcatggcaaaagaggacgaggagaagacaacattcatcacgccgttcggggtattctgctacgttaagatgccgttcggactgataaccgcagggaatactttccagcacacggtctatggcgcacttagcgaccagctnggaaacaatgtcaaagcctacgtcgacgacattggtgtcaagatgaaagacagcgactcaatgattga

SEQ ID NO: 75881 - DNA, 425 bp, Oryza sativa
  unsure (1)..(425): unsure at all n locations
ttaaccacctgcggcatgcaagcttcccttgttcaacctaatggctgagcaagcaaaggcgcacgacctctctccgagtgtgagcggcgacgacggngagccaaacccacgccgtcgagctcgtactccacctcctccgcgccaaagccctaagcagggggaggcgcttgagagggtcgacaaatccgtggcatcaccagtcgcaggtgatgcaggagaacggcgagatggggagcgtcgcctcctcgtctacggcgacggcagcacgcctcagggtgcgcttcaggctgctggcgcgctcctacgacacccgcctgtcgtccatgacccggagtctccagcccaacgatggctggaagacgtggccaacttggtcatgacggcacagcagcgcctgtgtgctggtggacggtcccgcaccacca

SEQ ID NO: 75882 - DNA, 423 bp, Oryza sativa
  unsure (1)..(423): unsure at all n locations
agcntttctcagtggcattttcacatttacactgacatttcgtggctttcatcattcgtgacggtatgcttaaattttctgatgttntttatggcaccatacgaaaatgctctttacaatatcacaatcgaaatttatcagttatgagagctttggtttctcctactttgtatatttcctttattttcttccccttaatgaaatgaaacgcaattctctcgcgttttcaagaaaaaaagaagtgctatttctagctgatgctattttggagtcccataggatgttttccagatctctattattattgctaattgttttaatacttctgttaataattttatacagaagagatttattctcattattatatgaattttctatctcatacaaagttgaccttatacaccactcttcatagactta

SEQ ID NO: 75883 - DNA, 459 bp, Oryza sativa
  unsure (1)..(459): unsure at all n locations
agcttatcaactggacctgaaagtgtcatgggcaatgattatgaggagaagaatcgggatgaatagggatagattggattatagtagatgaaataacaaggaacggtcctgaacctaaacggcgcgacgctctctgtcgcactgagaaggcaggccgatgggcaataagataaatcttgatctaatgcctaactaacctaggataggatcccttcttatatagatggaggagtccttaatctaatcctaacaaaccctaatcctatccaatgggcctaggacgaccaacccaaagcccatgacattactcccctctntttgagcagctcgtcctcgagctgcagcggaccctgctagactcaacaaaacatcataacctaaactaagactcttaagccttttacatcttggcttattataaatatatatataactaatactatngcagacaaccctact

SEQ ID NO: 75884 - DNA, 249 bp, Oryza sativa
ctccccctgatacgtgatgcattaagggatgacttggaattaagtataaaaaatgtgagatcactagtccagcagagatatagaaatgtgaagccatcttacagtaagttatggtgtggtagagagaaagcaatagcaccaacttttggtagctgggaaggttcatatggtctgcttatccctttcttagaggctataaaatctaaaaaccctggtacaaagtatgttcttttgtcgaatcaacgactc

SEQ ID NO: 75885 - DNA, 434 bp, Oryza sativa
  unsure (1)..(434): unsure at all n locations
agctnggcgaagtcgtcggcaggcaagtccggtgctcccaaagcggaaagcctatcctggagcgaagacgataccggcgacgtcgaagattggttccatcgcactcgtcgacaggaaactcggcgccacccctacctggcgcgccaactgccgaaacatgaattcgacaataatgaaagggggtagcgcacgagacctaaaagtggatggatgcagagacaaggatttagacaggttcatgccctctcaatgagaggtaataccctattcctgtttggggatttgaatccgccaggtgaattatagatctgatgatctagttgtgtctcatgccccctagagggcctcctgcccaccttatataggataggggataggattacaagatagaaaccttaaccaacacggtatcgngttcctaaatctattctaca

SEQ ID NO: 75886 - DNA, 181 bp, Oryza sativa
gcggagcaagaatttcacctcggagcccctgtcaaccaaagcatccacagcggaagctcccaaatgccacctgcacaccgaacgtacctgcaatattcacaccacttgcacggcgaccggactccacaccactcgaccccgactgaggatgcgccagatctggacctaggagcccgattca

SEQ ID NO: 75887 - DNA, 442 bp, Oryza sativa
  unsure (1)..(442): unsure at all n locations
agcttactccagatacttggagaacatctcattgtcagaaattgatggatgggcctgccttcggggaaacaggagagcataggggtgcaattatttttcccatttcagaagcagattgaccatacttctgacattcaagagaaattttccgcttaataaacagtttcgcttaacttcttgacacaatttggtgacagtacttgaatatttatatttatgtgctantttggactaagatctcttcattgtaccctggcccaatgcatgactctaaataacagttgcaattttaatcttgatacatgccttntattttgaagcaatactactggtcactgctctgtagtaattgatcatatgcagtcttttatgagggtaccgtgcataactttctgggtagcacgtgttggaactgttcaaacatccatatatactcgacctg

SEQ ID NO: 75888 - DNA, 445 bp, Oryza sativa
  unsure (1)..(445): unsure at all n locations
ctcccgaggagataggccacgttcttagctcttgactagatcgctgggatgtaaggattattctctattatagacccgtgtgtttgactgggctgacgcgtagcagactatgtgaagctgagaggtgttctccnccttgctactcttattgtcaattgagtcacaaacattggccttgcccatgactcatcgccactctccttntcagtgttgacttgctgcgtgtagtctgcttgacctccctcgaaactagctatatttacaactatgaattacatatacttatatttgtaactgaaagtatcaaaactcacgctataattacatggtaagtntcaatattatgtgtcagtggtatggataccacatacctaataataatggactaaatctcggcaggacccaccacatactatgtcttatacggaaacaaccttcggatata

SEQ ID NO: 75889 - DNA, 424 bp, Oryza sativa
  unsure (1)..(424): unsure at all n locations
agcttagttctgaacataatatactaatattgtggtatatatgtgtacaatgcttgaagtgacacattnttttttgaaaaaaaaaagaaactaccgtaaaaatatgactcggtaattacaaaagagggttgctagatgaggggtgcatactacctcttgttagctgagtctgctgcagcaaatgatgttagtaggtatagttgtataccatgttctcgtaggatactgtttactctntatttgttatgctccgctgctgtgatgcctgcgtcctatactcctagccaaacgcccacgcgatacggcgatggtggagagaggccgataggctatagcgctttcgagtattcttgtattcgacggtccatttgcagttacacgtagcaggtttattgattggtatgtgctgatactcgctagttca

SEQ ID NO: 75890 - DNA, 266 bp, Oryza sativa
  unsure (1)..(266): unsure at all n locations
tactggtaagtttcaatatttgagtggatgcaaaggttgatttgagtggtttccctatttcaacatttaagtgacactatcaatttccccagatgaaaaactactggttcaacatgaataaacacaatattnttgtgcagaanactgaaatagaagctgaactaacctgcaatccaaataggtaccaacatgaaccaacaacatgttccgccaaaacaaacattagaaggttaatcacaaagttagcccacgctgactcgaatatg

SEQ ID NO: 75891 - DNA, 186 bp, Oryza sativa
  unsure (1)..(186): unsure at all n locations
gagcgtcagtgagggaaatggcggctntattttaatgctggtgatgatttctctgtcgtatatatttctctctttcgccgttaaaaaaatcgccttaggcgtagcttatgcgctgtgggaaggtatcggtattttatttattaccttgtttagcgttntgttattcgacgaangtttatcgctgat

SEQ ID NO: 75892 - DNA, 454 bp, Oryza sativa
  unsure (1)..(454): unsure at all n locations
agcttgtaatctttcttttccttattntcaatttccaaatccaccaattctctgcaagcaagtatgacctcttcacccacaaggttgggttcaactatgctggaggtttttatcggtgtccatatcgaaccatttctcggatgcggtctacgtctgagatcttgaagtagttcatcatttgaaatgttcgctatctttntgttcaggcttctaatcttaacagcaacctcatgacgtgtccaaatattacaatgacacgaagggcaattgcaacgtgttggtttgcttgatgatgatgaaggatggtcagctaataggatgcttcctttaaatctagccaaatcaataatatcatcgacatcatacataacatctcttagttgtccaagccaattattaactgcttcatgatcccaacctcgtgtctcagcgtcattaagagaacatcgtatgt

SEQ ID NO: 75893 - DNA, 288 bp, Oryza sativa
  unsure (1)..(288): unsure at all n locations
tagctggctcctacacttcaccttggccgatggttgcatcttgcatggccacctttcagaatgggcatcacctttaattaaggtgtaccaactttacacatttacacattgaacaatattctcttaattagctaagataagatatcagaatggggctcaagaagtttagaattggctaggctggcttgcacatggctgcacccctgtatcttgcacaccattggccagcacactatatangacactaggaattccattatgtccttnctttatggactnggacacact

SEQ ID NO: 75894 - DNA, 458 bp, Oryza sativa
  unsure (1)..(458): unsure at all n locations
gcttcacctttcactgttttttactgaaacattctttntacanttttattgggatttaatgtttttatgcctcaattttccagcctattatttttcttgtgcacccatactagtatgattagtacagcactttagcggtctgattgactctgctaacctgcatttggcatggtgctggtactgcttgtatggagtaatgtagtgcgaacaatagtcgatgtaccgtagcatctggccagggaagacatgaggaagacttcgtcttcttcagcaggaatatctatttccctaattgattaaattaccttcctagtttaaggatttgctatcttgcatctgccagttcagaaagccctcttttttgtaataatggcattgtgatcgttntcattaagcaatatataatctataaacagctagttccatatatntcccctgtactaatctaacagcctcat

SEQ ID NO: 75895 - DNA, 251 bp, Oryza sativa
gtgatccaagcaatcaatctaggggagctgggagcgctcccctcgggtcccgaggcctggactccgacgggcctcgggggccgttcaggcgcgtacgtctcccctagggggtcgggtcgcgccgacggctgggctagcctttcttcaaaggcgtccggtggggtctgggctcgcgaggaagcgagccttgagagttcatcggcgacacgcgtatccgtctgggcacgtgccgaagcttatcccgtcgaaat

SEQ ID NO: 75896 - DNA, 403 bp, Oryza sativa
tcgtcttcgtcgacagtgtcagttaatttcttcagaatggagatggaatatattttgcattcagatgctgagatgcagaagaagaaagtatatataccccactacttcacatggaagacagcaccatttcttgagctttcacagtccaacaatggccatgtatgcatgcataccggaacacgccattgcaagttggcattttttttttgaggagatgatcagtgtgcagcatcaaatttgggggcagaaaactgtctgcagtctgatcctgacgaacagatggatggatatgcaatttgcatcgacaggggcactgatcaagaaattcagagtgcagacaggaaaaaaaatcaatggcattctgtctgctgattgattcttcccctgcactgtacatatatac

SEQ ID NO: 75897 - DNA, 180 bp, Oryza sativa
  unsure (1)..(180): unsure at all n locations
tgtccccttgttcgatgatgagttaatatcatttgccaccagtggcattgtntngatgctngattacaccagaatctctaagagtctccatgctggcatcttcaagatcatcctcactgaaacacacaatntgagagaagtgattacggaccctttcatcatcacaagcatgcgcaatca

SEQ ID NO: 75898 - DNA, 412 bp, Oryza sativa
  unsure (1)..(412): unsure at all n locations
agccttaatatcagtacattattatttactaaacgctcgccttaattacctatagcattaaggaagatcacatgccgcaacaaaattatctggatgaactcactccggcttttacgtctttactggcgattaaagaagcctctcgctgtttattatgtcacgacgctccctgtagtcaggcttgcccggcacagaccgatccggggaaatttattcgctcaatctactttcgtaattttaaaggcgctgccgagacaattcgcgaaaataatgccctcggtgccgtttgtgccagagtgtgcccgacggagaaattatgccaaagcggttgtacccgtgccggtgttgatgctcccattgatatcggccgcttacagcgttntgntactggaatttgaacaacaaaccgaat

SEQ ID NO: 75899 - DNA, 357 bp, Oryza sativa
  unsure (1)..(357): unsure at all n locations
agctngcaggcgccacccggatctggagctcctatgttgtatcctttccnctccgacagagctggctatggagatgatattttcgagtttgttttgtgcccacatgattgtgaatgcgaagtgattttgttgtttggcccacagaatatgactgtgatcgttcttgcgaatctgatgtgtgtccacatgatgtgaatgtattatatttgcgatttgagaatccctaatgacagcctgccactagctatgcttacagaatttattctttttgccgattcttatgtctgcgaagggtctcaattctcaccctctacaggtaaggatcaccattaatgtctcgtactccaacgactctaa

SEQ ID NO: 75900 - DNA, 430 bp, Oryza sativa
  unsure (1)..(430): unsure at all n locations
agcttggagaagatgtcttaggtggagtcctgtcttataccccagttgagcgcctgtgaagatggagccgtaggcccgctagtccgctgctgtttatttttgattgtcaggcctgaagcgcctttgtaataatgtaaatattatcgatataataaagatgtgtcttttatatcatgtttgtgtggtgtaccccggcttttcctgngacggngattaatacactagcgttcgggaaaaggcgattttcccggtcgcgacacatatgtatatagatatatatatgaccaaaatatatttacattatagaaaatgtgtacacatgcatatagaaacatatgtagtcatgtattaattacaatccattatatgtcctagctagctacgatttcgacgtagtagtactcgctgctagctcagaagctaagaaccg

SEQ ID NO: 75901 - DNA, 262 bp, Oryza sativa
  unsure (1)..(262): unsure at all n locations
atagtctaaatagaattggaaccttcctcctcgcttgaaaaaaccacagtacccatcattttatactcttcctgatcctctaggctcacatagctcgaagtcattatgtcagacctcacctacggaaaagtacaaaaaagaacaaacagatcaagcacccaaatataagcttacgtnncttatacctcataagtatatataaaaaaagaacaaccatcaactgcataaatacatggccactctaaactatngagcaatacta

SEQ ID NO: 75902 - DNA, 372 bp, Oryza sativa
agcttcggaggatccctatgcctattaccaggatggtgatgaagactatggcgctcagtaggtcttagtacggtcgttgcctgtggcaatggcgtgccgctgccttatttccgctgccttatctatttctgcttttgggatgtattccggaccgcccggtccgatgatttaagacaatgcctgcgggcttatgttgtaataattcgcactaaactctcgtgtgtgtgcatttggtatttcagctatgaactcgtgtgtaccagactacttgatccagggaaatggtactggttacacgattgatccctgttataaaaacgggggtccacatctacgaagtggagcaacggaggaggccgccagccaaaactt

SEQ ID NO: 75903 - DNA, 226 bp, Oryza sativa
  unsure (1)..(226): unsure at all n locations
agcgatccccgtgcttggccctggagggccatggggaagaaattcgccttgacccggtcatcaccccacgccgcctctatgatcgtcgtatggatctggagggactcggaggggttgacgctaccgtggtacctctcagtgaggctggtgccggaacttgggggccatcggacattccgaagactcgccacanaaacctggccgctagctntttctgatgagaatg

SEQ ID NO: 75904 - DNA, 441 bp, Oryza sativa
  unsure (1)..(441): unsure at all n locations
agctntgcagaanacagcatttaaaagtcacttagttgcccaaagccatnttataagacgatcctagagttacacagtgttattaatcaaggccgtgaaccctcacgaacctgccttaacccaaggcctacgatgattcagaccgaactggcaacccgaccctgggtcccagctcgtcccaagccaacccaggccaaccattccacattttagttgttaagcaaattttaagaattaaacactaacttgggtacattgctcggcttgcccataaccgagggcgcggctattcgaatagattatactctgatcagaggtgtacatctttacccacaagacacatcttcctcacgtgtaaccacgtgccacataccaccacggtatacggacggaagacgtgacatagttcccaacccatcctagccataaacaagagtaccg

SEQ ID NO: 75905 - DNA, 234 bp, Oryza sativa
gacattgttttcaagacagttccttttgtaactggacttttccgtctaatgtgcaaatatgttaaaggcatctgcctctggctgagccaatctctctttttgaaagaagataaaacagcctgcgtttgttgatgaaggactgtgcaccaggaaggaactatcaagagaagctgtcaagaaagatatagaaatacctttatcaacaaatcgcccctttcaccaatggagctcata

SEQ ID NO: 75906 - DNA, 210 bp, Oryza sativa
agcttccgcccgcgcgatccaccgaatgcggccggcggatgaggtggcgagggcggcggcgctggccggcccgctcggcgagctcctcccgccggtggacttctgctgcgcgtacggctccacgctcctccacgcccgccccgacgcgttctccatggtcgactacatcctcggcgtccccgacccgctccagtggcactccgaggtagg

SEQ ID NO: 75907 - DNA, 300 bp, Oryza sativa
  unsure (1)..(300): unsure at all n locations
ttcccccataatggcttaaattacaagaagatccccatataattctatcaatcaataatatcaatcaatattggatttattaaaccgagaaatgaaaagtcatataaaagagtattagagtgaatcctgcatataatttaattctaagggactaaattaaagtttaaaaaatgcttatcanactaatttttctgaagtacttagaaacattaattatatnttccccttaattattcaatcaagaaaggctaaantaagaatctatggcaggtatgactntgtatntatctactcttaatc

SEQ ID NO: 75908 - DNA, 375 bp, Oryza sativa
  unsure (1)..(375): unsure at all n locations
agcttcccaactgtgagcacagatagctatacctctnnttttttcttttcttgcgggaatagagagctntattgattagggcaccaaattacaatcctgccgcagcacatgcaaaatacaagacggagcttgatcacgccaaaccgcgcaatgagctgtccgtttcgcaagctgagcaagttcatgagcaaccctattacactctctattgacatggtgcacactcacctcttgcagacgcctaacagccgcttttatttcacgaagaagaaaagtccatctagaccgttccatatccttttctgcgatacttngtgttgccattaaacaatcggattccagtatcaccggcaagtgtttccattctgctgccaa

SEQ ID NO: 75909 - DNA, 348 bp, Oryza sativa
  unsure (1)..(348): unsure at all n locations
ccctatcattcgttaatttcaccagagaatcaaggctttcatcaagtgcagaaagctaaaaatcatattcgctggttgacctaattgtctacgatgatttaagccaccatgctatggcagcagctnttaggcctgtttcctactgcgaatctgattctagaaattaattgaaaacaattgaaaacatgatcatctccaatcgccatgaaccgtgtaatctcatccatctntctgaatccgaagaaccgtgtgttcttcagagaggctcagctgtcgcaatgccagcctctaattaacatatgccgactaatagtaacaaccctgtggtcttaattagctggcgatcga

SEQ ID NO: 75910 - DNA, 400 bp, Oryza sativa
  unsure (1)..(400): unsure at all n locations
agctntagacaatntaaaaacatgggtgggaaaaatcagggattttaaaacctggtggttgtttgacataaacttcctccagtataaaaccatttagaaaagcacttttcacatccatttgatacaatttaaaaccttttgaagcagtaaaagccaacaaaagtctaattgcctcaattccagcaacaggagcaaaagtttcatcaaaatccaaacccttcacctaggtaaaaccttgaacaatgcagaatttgcacaaacatcatgagtcgttaccttagaccttgtagttcgctcacctatattaccaatgatttgtttcggcggatgtcgttgaatatgcaaaggagcaacgacttctgaagttgtttcatgttctgtaccctcactgggtcgaagt

SEQ ID NO: 75911 - DNA, 332 bp, Oryza sativa
  unsure (1)..(332): unsure at all n locations
gcatctccccacattgctctgtgaatgtatgacagagatcagaacttaatgtattgtatgctttcttgatgtgattggtgtttatgagcctagctgatggcaatattgtgtgtgggtccacccctaatcatgctntgttcttgaactcttgatggtggcttagcttgcatgcaggggatgatgatccagtgacagtgatggcccctaactacacatggacattgtcctcattagatggccctctagctagaatcattccttgggccctggttgaatttgggagatgtgttaataatatggaccatttggcagatgatgttgccatgctggat

SEQ ID NO: 75912 - DNA, 384 bp, Oryza sativa
  unsure (1)..(384): unsure at all n locations
taagcttggagaagatgtcttaggtggagtcctgtcttataccccagttgagcgcctgtgaagatggagccgtangcccgctagtccgctgctgtntatttttgattgtcaggcctgaagcgcctttgtaataatgtaaatattatcgatataataaagatgtgtcttttatatcatgtttgtgtggtgtaccccggcttttcctgggacggggattaatacactagcgttcgggaaaaggcaattttcccggtcgcgacaagctggtatcagagccatctcgactgtaggataagccaagtggataaaacctaaggacatattttataaatgaaactattngcgaaagctcctctttttctccttcccctaatgctatttgca

SEQ ID NO: 75913 - DNA, 313 bp, Oryza sativa
  unsure (1)..(313): unsure at all n locations
aggagcattggttaagccgaacgacatcaccgtgaattcatacagtccatatcgcgtagtgaatgcggtcttcggaatatcttcttcccgaatacgtaattggtgatatccggaacgaagatcaatcttggagaatacagtggcacctttaagctgatcgaacagatcatcgatccggggaagagggtacttggtattgatggtgacttcattgagagctctgtagtcaacgcacatcctcttncgtttgtctttcttctccacaaaaatcacaggagcaccccaaggggaagtactcggacgtatatacccc

SEQ ID NO: 75914 - DNA, 441 bp, Oryza sativa
  unsure (1)..(441): unsure at all n locations
cacctgcggcatgtcaagcttgccccgccgatgttcgcccacgtgtgatatgaacatgtacagttgtctcctactanctttggttccttgatgatgctgagttgagaaaaaggctgtagcttcgctactcgtctgtagtctctccatatatagataatgaagcactgaagcttgaaatatacacctacagtttgtctctttatgaataagaccatatacgcaaaanaaccgatgttctttgctgcggctcgcgtgtcgtcaggctatatgcagttttttgtcgcaccataggcgatggacatctctggccttatactttcgtaaaaatcttatcatgttaagcgatgggcttgctttggagttcatagttctgtgctctatgatngtgcatcagcttggggttcatctatatataatccttcgctgctgtttctggtattg

SEQ ID NO: 75915 - DNA, 322 bp, Oryza sativa
  unsure (1)..(322): unsure at all n locations
cagggatttcaagggataggaaaagtctctccacatcttcgaggaattctagcatgggggctaacctcgttggttcgaattcttttgtgattnttaaggcatgttctctcctcctctctctagcaaattaaacatgtaatctcaattntctctcacccgttcgatatatccaaacacttgtgttagaatgattcctggtagttgattgcttggaggaattttcatgtcgtggacattcaatcctaagntntcctcttcctggtatttgagtcatggtccanaggaacccttaaagtggacctataactntcatcaatacata

SEQ ID NO: 75916 - DNA, 450 bp, Oryza sativa
  unsure (1)..(450): unsure at all n locations
agcttctcttatacttgaaatataagcaattatattggcaaaagagatgnaactatccgtgggccaaattcggaggagagaacaccaagttttttcatgctatggccactgaatcttttagaaagaatactatatcttctttactggatgtggatggtacatttctaactagccatgatgacaaagctgtggttgcttggagggcttataaatcaagaatgggggtttccatgtttgaggatatgcctcttgatttaaattcacttattgatgcccatgaaggtttggatattctgcataccccattcctcanaaaagagattgatcagctcatcaaggatttacctactgacagggctcctggtcctgaatgggttagaggtcttttattaagaaatgtnggcccataatctgtcatgactattataagctatgtgatgaattccattc

SEQ ID NO: 75917 - DNA, 153 bp, Oryza sativa
acccccgaatggattcaggcctacacagtacaatgataatttatcaaattgacaggaattgagctacagttatgagaatgaacacaaaagtagaagcgtactgttgctacacaaacaggcactactacctgtttcaggatttcaaccatcata

SEQ ID NO: 75918 - DNA, 437 bp, Oryza sativa
  unsure (1)..(437): unsure at all n locations
agctnggaggtctcccgacgtggctgatccctacgagctgggtgatccgggttagtaatgtcgtgtgggtaaagtgtaccccctctgcagaggttaacaaactgttcgaacagccgtgcccatggtcatgggcggatgtgaggtgtttcctagcgtagttntgtttgactactgcttgtgaaattgctgttgtgaaaaggggttcgatgtttgaaaaatcagcagctgacgggatcagctaggcccgggtggccgtttgaaaagttgttggcccgggtggccgtttgaaaagctgttggccgggtgccaattctgtttcaattctaaagattgatgcattgcacatactccgaccggacgagacgcactgtctcatncgagtcgtttgagaagcactcacctagtcgttttagaaaagaagtcanataaaataaatt

SEQ ID NO: 75919 - DNA, 296 bp, Oryza sativa
  unsure (1)..(296): unsure at all n locations
aaagtggagatgatgataagggaaagaacgtctccgatgtttgcttcatggcgcgtggtgaatctgacacagagtatgaaaacaatgaggtgagtgcttttgagggaagctattaatatttgagtgtaaaaaataagaagtgtgagaagatgtatagaaaaaaggaatctatcattgaatctcttaaatctganattgataggttaaaatctcttattcctaatgatgatgaattatgaaaatgtgaggttntaatgaatgagatttcnacaaatagagaatgtaatgctgcacat

SEQ ID NO: 75920 - DNA, 458 bp, Oryza sativa
  unsure (1)..(458): unsure at all n locations
agctnnggggnngtttgtgatggtagttaccgacaaattttggccatcaatataattaanataatggagaactagctatacttacaatgcatgtttatttccaaaataatatatttccacttgtacttggagaataacatgttgcaggaatttatcaaaaaaataaagagaaaagtgaagaaacctcactcctaagcaaacaaatggataaggagggcccacatgttagaagcaaccgttggaaaccgacttttaattgccacaaccgcctaagggacccacttgctagcgacctgccaaagctggaggcctgctgggctggcccangttcggccgaaccctgtcagctacggctccggctggccttacacgtggatgtcacggattgcttcttaatgacggctataagggtaaaatcgacatttttgttttctacaatcgtcataccgacctataaa

SEQ ID NO: 75921 - DNA, 329 bp, Oryza sativa
  unsure (1)..(329): unsure at all n locations
ctccccaaacatctacaaatgggcccaaccaccatgccactgggctgaggatccatcaaacgacgtccaggaggaagcactgngctagggaggcctgctatgggtcggacgaccctggcctggctccgctggcctaggcccaagccaatgacagttgtaatcgaccttccaatgacgctcacaaccgtcatcctcaagctatanaanggacctctcatcttcattccagcatacacaaagaagggatcgcgaataagaagctctctttagttactcactttgctctagtgctagtagagttagaaatagaatagtctccttagttcttc

SEQ ID NO: 75922 - DNA, 437 bp, Oryza sativa
  unsure (1)..(437): unsure at all n locations
agcttagccaaatgtatatatgttgccggcttgtgttgttggcacgggttgtcaaatttgtcatggtcgtacctaccgtcagactgagtactcttttgctgtattattgatataatccgtgtttagttctttggccaatttttttttaagtatacgtacacacatttgaagtattaaacatagactaatgacaacaaattacagattccgcttataaactgcgagacgaatatattaagcctaattaatccatcattagcaaatgtttaatgtagcatcacattgtcaaatcatgacgcaattaagctcaaaagattcgtctcgtaatttacatgcaaactatgcaattggtttttttcgctacattaatgctccatgcatgtgtaaaaatttgatgtgacattttggccaaaaattttgggatgtancacacccac

SEQ ID NO: 75923 - DNA, 250 bp, Oryza sativa
aaagtgtaataaatttgctgcaagaccctggacgcattataatataatatccacctaattgatgagagagagaccacatcaaatgaccatattgcccttatctatatcttgcttcttccgacatttgtaagaagaacagacaccataatacattagcgtggggtatcactgtgaccatgagcttgagaacctgctgctaactaggctgagaacctacgacttaggctcagcacagtcaaataccatgcgc

SEQ ID NO: 75924 - DNA, 485 bp, Oryza sativa
  unsure (1)..(485): unsure at all n locations
ggatccttaagtcacctgcggcatgcaagcttgaaactngngatgaatgcaaaacaatgatgaggttaaactttgtgttttcatattataaacgtactctccttgagaaattagagcatctaaaacaaggtgacaaaaccgtgcgggagtactttcataactttaaaatttgtatcacttatagtggtttaaaagaaagcaatgagaacacaatgactagattttttagagggcttaattatgatattcaagctgggcttattaacgtgacatataatcatataggccacttgttcatgcttgcttgcagtgttgagagcaatattttaaagaacccaagggagaaacgagctatgcttgtgcctcctattactgacattttgcagggagctcagaatattcaccatgaggaanagagcaatatgctcgagatgtcatctccatcgctcacgaaggaagaagagaagactgaagcacctatatta

SEQ ID NO: 75925 - DNA, 271 bp, Oryza sativa
ctatagcagagaatggggaaagtggcgagagtttctgcggtgaagacgaaccgacgctttgcttctagtgttattttattagggtatcgggagtactaatgggcctgggcctaaacagtacttcagcccaattttgctatcagcgtggctaagttgtgattcttatggacttagggcatttgcttcggtgacactggctcacaacagtatagtccaatgctgttaaaatcctttttgacgcagttagataatttcttggaatactacgacg

SEQ ID NO: 75926 - DNA, 415 bp, Oryza sativa
agctcatcagattcagagagagcttaattatcttcgatgtcccatgcatcgatctgcacctggctgtgcatgtactaccccaatgcatttctctctctacctgcgtgtttgactgcaccttgagcagcagcagcagcctaaatgctagctactctgcattggaccatcctcctagtcctaggctgtaggctcatagccctccttgataaaagctactactggcacagtatatgcatgcagccaattcacttcactgcagtaaaaaaaaaaagaaaacagagagaaacagagatcaaacaatgcaagaaagaaatacccctacttctactttaaaacaaggccaaagcaaggaaacaaaaggcagcctctattttttttccctcccccccctgctcatcacccctttccatcactc

SEQ ID NO: 75927 - DNA, 465 bp, Oryza sativa
ctcgaccctggaaccaagtcacctgagcatgcaagctgcttgcgatttcaattctcttgtacagcttaagatgcaagaatcttgagctaatagtgccattgagattagttatagaaaagatggaagaatttcagcactatcttaactatatatgcatgtctaattatgttcttcagagcagtgataattgggtgacactgtttaaggttaatgatgtgctttttgtgtgtgttttgtaggtgaaagagtttattttgagccaaccagaggcttacgagtttaagattgggaatcaagctttcagaaggccaggagacccacctcttgatgaagttgtcgagatgctacagaaacagaagagtactatgctcagccaagatcctggctcgcaacagtatatatctaaagttgagctatagaattgcccatcatcaaaattcagtagtttctgtagggcatgttctt

SEQ ID NO: 75928 - DNA, 219 bp, Oryza sativa
  unsure (1)..(219): unsure at all n locations
aaacaaaattatagctagttgagtggaacaaaaatgcagaaaggaatgtctcatgtgaatcctcaaatgctacctacttctctggaaagctgatcatgccatacctttcagttnttagcagaatctttggatgttgtgaatgacagtgagtgggtaatatccttgggcgaatgcattgctagacaatatgatctatacgctacatgtgatggacattct

SEQ ID NO: 75929 - DNA, 450 bp, Oryza sativa
  unsure (1)..(450): unsure at all n locations
agctnttgaccaatgattactctattatgacacaatgttaaagggatagattcatattcaaaattactattataattataattttgtcatataaataatattttaagcaattgttagccaaaatctcgtcctaacgaaacaaaatacgccttatttttaaaaacacggagtatatccttaaatatttctctatccaatataaaaggtcaatcttttaaaattccgatcatcaataatttctcaaataattactttgaaataaaaaaacatatgcaaatttgtgtcgtcataatatccaatgaacttattcaaatttataaacttattntaattcanaatttgatcattaattntttttttaaaaaaaaaccaaatcttatcataaacgtcaaatataattttgatagtgggggcgagtataccataaaactaacaacagaagagacatga

SEQ ID NO: 75930 - DNA, 253 bp, Oryza sativa
  unsure (1)..(253): unsure at all n locations
tcggttactttcggcactcgggagaacttccgtacaaagaacatttggtttgaggtcgctgantttgagacagcatatcatgccatactcagatgcccgacgttagccaagttcatggcagtcccgcacaatacctacataatgatgaagatgcctagtcctcgaggagtcatatccctgcggagtgacatcaagacaagccgcacatgcgacaaggaaagctgcgagatggcccagacccgcgagatcactc

SEQ ID NO: 75931 - DNA, 444 bp, Oryza sativa
  unsure (1)..(444): unsure at all n locations
agctntaagaaagaagaactcacctctcttgctcccaattcagtaaagaagtgatcgagcagtgagcgctttgcctcccgcacttgacagtagacaatagatttcggaatagagttcctcaaggttgaacataccatgttaatatatgccagaaccgttgttcctgttgagtatgaattgtagcaaggttcagcagaaaatacaggtaaaataagttaaaaggcagccaagcaaagccttgatggcatgtatattcatcattaaactaaattagtgggcaatattacacaaggttgcaacaatatgataaaccacttctcaacttcaacaaatggccatcattgcaaagcagtaacagtatacattgaatatatacaaggaagaatggttgatgacttaccaattcgtctaagataagaatcattatatctatcaaaaatagag

SEQ ID NO: 75932 - DNA, 380 bp, Oryza sativa
aactataccgaattgcgcgtcctcttctcagcattgttaccacgtaactcctttatcgtacattctcacctgtcccttctctataccttacgttatcgtggagtcacgtaatgccttgacccccccggcgcggattgtcgtgagggcttctttttgacctcgttccctaccttcatccatccacgcacgccgtcccccacattgggagagacaaaaggcgggacgctgatcgagcttcttctcgggaatttagggtatgttcttgctgtgttttccctcccctgtattcgtgataacggtgcgttcttgaggctacttcggtttgcgctccacgtgttcggtgaaatgcctgtgagagaggaggaagaatcagtactcat

SEQ ID NO: 75933 - DNA, 395 bp, Oryza sativa
  unsure (1)..(395): unsure at all n locations
agcttgagaggaaactatggaggacaacanattaccgatgcttgtgtgtgcatgcacatgcatgcgattgttgtgggcttgcggtgttgtatttaacctttgggtgtaagtggtgtgggggaagtacttcacacaactatatgaaggttaaacaagtagtgttgcagccagcagaaggaaaaaaaaaaatcatgtntaataacacctgaccaattaggaagttcacacatttagcagttgcacttgatcaaaaaaatatgtttgatggcataaacatcagatacacactcagtgtttatctccaaaccatgagagcaacataaataagatttaacataggtaagaacgaaagaacctacatgtaggtgacatgaagtgtgattgaaaaggtacaa

SEQ ID NO: 75934 - DNA, 216 bp, Oryza sativa
  unsure (1)..(216): unsure at all n locations
agctctatcatcccccgtcacagtttgttgtcacctatatgggtatatgatagcagaccacatattcggaaatatagctggctactctcaaaagtaaaactcaatgtgcatctttcgttttgccattccgcaccttttaacactataatcctttggtgtcgctataatatcaaatggaactntaccagtggcctgcaaatgagaatattataagat

SEQ ID NO: 75935 - DNA, 457 bp, Oryza sativa
  unsure (1)..(457): unsure at all n locations
agcttgtcttatttctatctntggcatactcactaataaagtatagctagtctttattgtggcatagtattaggagacaacctttaatagattctccatttgacatgtgatattgtaatgattttgtatcacctaacttttattgtttgatgaaaaatcttggatgacaaaaatgttgctgtgttaggatatatttgttgataaatgactaatttggaatataaatagtcaaatagaaaaatatcaaatgacaaattgacataaatgctacggatgtgcaccaacaaaagcaaataatacttcctccatctcatatagtgcgttattgttttatggaaagtttgacatttgtaaaacctaggatttatttaaatggngctgtctattgcannaattgacagagaactttagattntcctcgagttgcatcaagattcatacataanaagtaacatta

SEQ ID NO: 75936 - DNA, 162 bp, Oryza sativa
caccgggttcgcccgtgtcagagcagctgacgcacataaagcctggcaaaatgtcagcttcaactcaggtcttagtttcagagtgcatttgaagtagagtagatgacgagagcttgcagagatgcataccatatgatgtaaattaagatgagaatgctcaca

SEQ ID NO: 75937 - DNA, 328 bp, Oryza sativa
  unsure (1)..(328): unsure at all n locations
ccccaaatggcccaaaggactttacggaaatagctcatgacttctgcattaacagcttcttcagatcaatatctccagtggcaaatatatcaggcatcataaactccaacaatgaccatagctcctgaaatcagttgaaaacaagtggtactttaagatgaaatgaactgaacttaaagtagtgaaagcgcatactcanagaactggagacagaaagctatccgaaaactggttgctattatntcatggctntccatgtnagtagtaaataaaaactgatgaacagcanacagcattgagaacctgacatgcaatcaccatatccaaa

SEQ ID NO: 75938 - DNA, 455 bp, Oryza sativa
  unsure (1)..(455): unsure at all n locations
agcttgaaagcgtgcacacaaacacatagaaaattgtatgtctggcctggaagcagttagatccaatcatacttctatatttcttttgatcaacagcttcaccatcattatcacttcgaattcttttcaaaaaaccaggaaattcaagatctaatcgaagaaacaacacgaaagtgttgaaaagcttcgtccttagttgccataaagaaaacccaagaatatcgagaaaaattgtcaacaataaccaacacataccactttcctccaacggattgcactctaggtggaccaacagtgtccatatgtaatagctgtcccggtgcatccgtcatcacagaaacaataggagcatgtgaagaagcaaccatcttagcatgacgacacggtgtacaaaccatatcaagatctttcttaagnttaggcaaaccacgaacaagatccaaaccacttaacct

SEQ ID NO: 75939 - DNA, 309 bp, Oryza sativa
  unsure (1)..(309): unsure at all n locations
gatttatggtttagaagctgcagaaaaaattgatgagttcaatggggttatcaaaaaattgtttgatgtttatgctactagtgcgtgtgcaacatcaaagaagaaaggtgctgaaatgcatgtgcatcaacttcaaattcaatctgatcctgttcataatactgatgagtttgatgatatctttaatgagaatgacagtagccatgatcatgagcaacattttcaaagaatttngcttgagagaagtcagcgcaattgtagtgataaaaccgagttacaatttacatgaacaaccactgttactatgac

SEQ ID NO: 75940 - DNA, 464 bp, Oryza sativa
  unsure (1)..(464): unsure at all n locations
agctngtggatatgtgactatgcatggagagcaaacctaacaggtttagagaatttagagccacccatcataactctactcaaatacataaagtagtctgattttgttgtaaactatttgactttttggtataggctagtattattagctgagcaaaacatggaattcattattattaatctaacatgaaatatgcatagttataatttgggctcacaacaaaagacgatgtaaatctctcttttccaccaattgatataaaaaaatttagccctcaagaacaaatgtgtaaccctttcttgtattgtgtctataacatatatagtagactaaattgtaggaaagaaaataacatagttagctactttacaaatgcttttctattagtgtatgttagacatgtggccttcattccagagtctgccaaatccagatcagataaagacttggacatttttcaacac

SEQ ID NO: 75941 - DNA, 360 bp, Oryza sativa
  unsure (1)..(360): unsure at all n locations
gtgcggcacgttgtccccccattaaaaggtttatcgcatgattagctatatttatagcaccatcttttaagaaaaaaaataggctgttcattttttacattctaatntacatacacattataaatacactggtaaatttgtaagtttcaatatttacatttgtaatctatactaataatataaaanagatagtagtggtggcgaatatatcactgccactcaattattatacggtacccataaacaataagataaaactntacatgggccgtatgcctaactcaacagataccttcanataaatagaagaaatagcgtgatgatgatatattanataaataaannatattatatatacta

SEQ ID NO: 75942 - DNA, 446 bp, Oryza sativa
  unsure (1)..(446): unsure at all n locations
agcttggcgtcaacattgccagacgagaagaaagccgtgattntcttaacactgatggggacaagaatgattatgattggtatgcagtatgcatgcttagtatcacatattgctttcttttgtttcaacttcatagcacatgtctcttttcatatagcacacatagctttgagatagatttcaacttctcttgtttgtttcggctatttgcccttgttttgttcagtacgtaataatgcaggatttattctcattgcctgtagataggctactagataagcgttcagttgtgaattgctaaggctcttgttggtcatgtatccatgtggtgttatttaattgtcgaaaatgcaacgtttggttagctgcttaaattgagatctctgagtctattagtatcaaactatctatggcaatttcatgcttcttttaacctggacctaatg

SEQ ID NO: 75943 - DNA, 373 bp, Oryza sativa
  unsure (1)..(373): unsure at all n locations
catgtcgatatactcatctcgaaccgtgcttgtgtcccccaacagtggatcaaagcagcatcaaccatctctagccattaaaaatcctggacttagaaataaaccagacactaaccattctgaattcatgaatgagataaattttcaataaaaaaatgacatcaattagacacaatagagatatcaagtttgggtttctctgggtcatcgggccaaccaaaaactcaattaattgaactatgtcagaattcaatgaaaggaaagtgtgataactgataactactggactagctaagggcaagtttatagtaaggacagttgccacgtntaattntatctatntaagataagatgtgatatatatatatataga

SEQ ID NO: 75944 - DNA, 272 bp, Oryza sativa
  unsure (1)..(272): unsure at all n locations
tcgagtccgtactgtgtccnccctaatttgaagttgaggtgattgtggttgcaaaagagagagaatctggatgtgtgccatctttctattatttaggtcgttgattgcttaagtttcaatctaatgctaaatttatggtattaccattctataacttntgtctaacacccctgcgttaaaaatttcatgtggaacctgctatggattgggtgggatattntcatgagatctcttcatcaaagcatgatctgtgctcgtattacaatataaat

SEQ ID NO: 75945 - DNA, 459 bp, Oryza sativa
  unsure (1)..(459): unsure at all n locations
agcttatagaatgagttntgtaattagtgtatgtttaatacttcaaattagtgtcaaacatccgatgtgacagggacatagaataagttattggaaaccaaacagcccctatgcatgctggcatggttgcatgcatgctctactgacccatgcgcaggcacagcacaacaagataggtgtagacgaagcgagctgtacaagatcgggggaatcacggagcacacgcatgcttccctggctccctgcccctgaattctactcatagtatcaagaatcgttcgtaattaaaggtaaatcataatttactaatacaataattaaaagtaactttgttatttatgtcattatctggctggatcgatacgtggtcatctattacgctagcatcgcttatattccatcgaaaagctaaaaaagaagaaaaaagagatttagtcactgcccaaataataaatacta

SEQ ID NO: 75946 - DNA, 247 bp, Oryza sativa
  unsure (1)..(247): unsure at all n locations
cccccctatctagattcgtaatatcataatattatgatgagtcttattatattatacgttgctatattntggaacgaatgtattagttcccaggaaaaaaaaggttctctcatctgctgtcctttcatctgttacaactgtggcgttcatgcacgcgcaatcatgcaaggattggtactgtgctgggttcgtgtgaggcgctggccatggccccggaccccgccacccgcggtggatcgatcggcac

SEQ ID NO: 75947 - DNA, 386 bp, Oryza sativa
agcttagggatgtgcaatgcgtcaccggttgcatggccgccctaagtcggttcatatcgaggctgggagagaaggcgctacccttatttaagctcctcaaacgctccggaccgtttacctggacggaggaagctgaacatgccctcgctcagttgaaggcgtatctcagctctcccccagttctggtcgccccggagccaaatgaacccttgctactctacttagcggcgaccccgcaagtggttagtgcggcgttggttgtggagcgcgatgaggacaatcctcattccgcgcatccccaccctgcgctggcttggcccgggagagagcagggaggagaggcccccgagccgaacggtggcccaaggcccccgacgaccggagct

SEQ ID NO: 75948 - DNA, 241 bp, Oryza sativa
cccccattctctgaacgggaaaaagaaaaattggcggcagtagcaatatatgtcgccaaaaccaatctgaacctcgagctcacggcgttgatgttcctggtagcatggaggagctcacatgcagcatgttgactcaagccatgcatgcatatgtgccgccgcagacgtcgagcatgcatgctcgttgcgtgcatacacaggtgcagaacagctagagccatgagtagacggtagacgatga

SEQ ID NO: 75949 - DNA, 450 bp, Oryza sativa
agcttcctcctttgcccaagttaccgagcagcctaacatgcaagcaaatacatcaacttgccaggctgttactcatcaaccacctgatgggagtattcattcggttagaactgagtttatcaaccctcgagcatcaaatattgagtcatattcagtcaaccagattctaacaagatccatctttgagcaacgccctaatgaagctgggtttcaatcagatcccgttgctgttgagttgagtcggttacagatgttacgttgtctgatgaccaagagacatgaagagaaggttcctttcttgatcccttcttttttttattcaattgcaaatagcatgtgcacatttcttgcatcttaatagtcttgctcatctaatcagcgtcttctcatgaaattgatcagcggcaacaaattattttggcacgtgaaatagagatggctgaaactaaa

SEQ ID NO: 75950 - DNA, 129 bp, Oryza sativa
cccccccagggtccctgaaagctagtactcagcaggggtggtccattcacccatgtggtgcgacctgacttaatgttggatgcaaattcacaggatcggtccttaagtgcgagagcgggaaaccataca

SEQ ID NO: 75951 - DNA, 274 bp, Oryza sativa
atgaaaagtattgaaacatatccaaatagcatactatcaaacaaaattctgtggatagacctgctcaattgtcttgtggagcagtacagatagggacaatggcagcctgcaaagctttgaccaaagtcacctcttgcactgacgtttgttacctgctatgctgtggataagtaagaagtttgatcagatgaaacccttgatgataattgacaagataaaagtgaggcagcacacagagagaaagagatataccattcacccctgctcacctgac

SEQ ID NO: 75952 - DNA, 166 bp, Oryza sativa
ccccatccccccagaaatataataataagtatgaaaggaaactcggaaacgataattcttacctcaagggtctcaaaggacttcttcacgtaactaacctctgattcaaagatagcaatgtaaagcattgcgtctactcttatgaaagcaaatggtatatcaagga

SEQ ID NO: 75953 - DNA, 320 bp, Oryza sativa
  unsure (1)..(320): unsure at all n locations
agcttatagatattgactaagcatgtaagtcttgatgattaaggangaaagatgcatcccctcctcaatgatatggacctctaggccttcacaaactgtccttcattccttggtaccatgaagcctttacaaattgctcttctgctcttcaaagatttggagtatgttgagacaatccagctcccgtgggaactgctgttgctgttggcgatgatataaaagactcctacacttagacaaattgaacatatgaaatcgacttggatagacttgacggtaacaaaagacttcaactgaactgaaggacagaactatactat

SEQ ID NO: 75954 - DNA, 244 bp, Oryza sativa
  unsure (1)..(244): unsure at all n locations
aacatcgtagaatacttattgaaacatccaaataataccatcagaaatatttaaaaagattcattgcaacgtaaaacttaaatgtgcaacggaattgaattatggttgaaacattgtttccaatacgcaaaacatcaattctcactaattgaaacatatgtattntatatgaaatcttgatgtagagttntaagtataacgaatagaacaatataatcgaatcacatatttgataaataattta

SEQ ID NO: 75955 - DNA, 399 bp, Oryza sativa
  unsure (1)..(399): unsure at all n locations
agcntgactgcttnggtactctatggatcctctngcacaggcgcacagcataacatcaattcagattagtgatgtgtgaactgtgatccctgcttgctatgatcgtgctcacgactttcatgcagctcaacttcgtgcacacgacttctatgcagctcttctacaacttgggaagatgacaaagctgtatttagctggcgcccaagtcatatgttctggccagccaaagtcgtgagattttaaagaatcgaagtgcagtttaacagactgatactttcccctacctcaagagttctccacatcttcagttcttcagaaatttgagcctgattgaagatatgacttgttttccccgattgattgtcctgacatctgtaggtatgttacttgcgactatat

SEQ ID NO: 75956 - DNA, 442 bp, Oryza sativa
agcttgccctacgtatgtcgtagctccctcgaatgaaggcagccgcgtaccacaagcaattcttatagcggtcaggcaggccatagtagcagaaggcagccaaccggacccttttctccaaggggtcgttggagcatcggtccggtgcgaggttttccgtcaagatcttgagctcatccgccgtccggtttgggttgttgtgcagggcatggaggaagaccttggcgcagaagtcatccgtgtcgcacctggtgagtacttgtttcacggcatcgctggtgttgtagctgctagttagctgcagcatcagttggttagctttcttgtagtggaaatcgacatgggagtaggacacagttttcatcagagggagcttcgacttggacttggacttggaattgtgctttccaatctttgccttctcacctcacctcaccgcgcc

SEQ ID NO: 75957 - DNA, 494 bp, Oryza sativa
  unsure (1)..(494): unsure at all n locations
cctganggcatgcaagcttaatgggttctcgcaatatcntctcattgtatgtgattatatttatatctgttannaaactttccgtatggagaagagactatgttattgactcctacaggaaagaaatgtggctattgaagcacttccaattcaactactaataagttatttataacatgttggctatagatacacagaataatggttccgtgtctctttaacataatccaagggtactaaagtgaaatatgatcttgcgtttcattgtttggaagaacattggcagcaatctgaattacatattcatcgcggatacaatcacgttaatcaacattctttctgatatatgtagaagctctggtatttaatacatcatcaacatagctcgcaacacataatgtcatgttctgacccaaaggtgttcttgctcacaatttgcttaattaagcatcccccttgtttcagctaatatataagagagcactctataaagc

SEQ ID NO: 75958 - DNA, 382 bp, Oryza sativa
cacgtacaaccaccagaacttattgggggccttccgtgaatcgaatacggaccatacttccgcgaaaagggccgcgagccacctgcatgccttcggtccaccttacggccggagcctccttcgccgcacagtacttctcgacgctcggccacacgcaaggacgcaaaaaaacctcgccgccggcggcattgtcgtacaatagaaaaaaaaactaacggataaaaaggaacaacagagggggagggggttcggataactaaaccccgaccactccagggtctgaattttactgagacagagtcacacggataacacattctctttctaggctggtgtcaattcccatcaatatgtaacctgacctgcgcatagtactaacccc

SEQ ID NO: 75959 - DNA, 427 bp, Oryza sativa
  unsure (1)..(427): unsure at all n locations
agctntgggcaacccctttgcctctcttttgtttacggatttgctaaaaaaatttcgcaagtattttgctctcaaaactttcatatttgttaatcatcagattgtatcgagatttgtgcatgagtgaaaaaactgatagaaagaaattttcatgcatgtcatacgtaagatcttcgtactagctaaccaaaccatagttgaatgcaagttttatataagttatatcgtaggtacagtatagttacagtgcagttatataatggaattatattttaatcataatatagatatatgtgaaagttttttactgaaataacttgtggcagttcccaatagaatactgatgtggcttgggggctaattaattctattaggattatagtagtaagttttaccgatcagacataacctctcttagtttccttga

SEQ ID NO: 75960 - DNA, 178 bp, Oryza sativa
gtcctaacatgtgtctatgccacagttataaagagtccccattttctcttgtatttacgctttacgtctttacctacatgtcaatgaacgaaatgtatcacactgtaatccttacactttatccaatctgcgaaagagatccctggcttattactggtcaggatgcaatacagggcag

SEQ ID NO: 75961 - DNA, 413 bp, Oryza sativa
  unsure (1)..(413): unsure at all n locations
agcttgtaataatattagaatattcttctttatacatttatggtattgaaatacttttggagtatatgaatgcctactttacattatgttcatgttattctgaatataccgctagcttatctgggagatgctttggcgcgggtataatgtttgcttatgcaattactctatgtcatgacgatgatattagagtagtatctggtagtttaggcatggtgtctagattatgagatatcattatttggggttatatgctgcggatgagaggtgggccgctgatggtgatagctcantacgggtattcctccatgcgtgtatataatcctaagataattccctggggagggtattcctccgtatttagccccggttgtatgatcatgacgggctgtcgtaaggaactcggcagtcag

SEQ ID NO: 75962 - DNA, 437 bp, Oryza sativa
  unsure (1)..(437): unsure at all n locations
agcttaataatccgcaaatctccatataacagcattaaacctcggatgatcatattttggtcatacgaactccgaatcgacccgttcaagtctcctaatgtttgttataacctaaagaaccctgtgctttctttttatgtattggtattgcttctttataggcttgtagctttgcttgtgtgcttcgcgtagcttctgtcgttccggaggttcccgaagcgtggttcgtggtcgtcgccgtaggttcggaaggccgttctctctgagcaaggcaagtcacatcatccttgagcatattgaatcccagtttacaaaattatttntaatttaaattaatgcattatcgctttgtttaaattcccgcgttatcactgttttatttagccatgcctatttacctttgttatgaccttattatngctatngnntatattatt

SEQ ID NO: 75963 - DNA, 434 bp, Oryza sativa
  unsure (1)..(434): unsure at all n locations
agcttggcagtggcgagaggcggngagaatggtgcatgtgtcgaggacgatgcgaccacaatgtggtgcaagtggagttgacctcgaagacgatgcggcggaaccgcacgtgcgcctctacggacgagaggcggagctcggggacacctgaacacatcggcttttgagcagctcgacagggggtgactatgagcttgggggataggagcttggacagcgtgatgaggtagaagcctcatcactcacgcgtgcaggtgaagacgacattgcagttgtggttgggacccgcgccgcaccccccctgcgtgcgcaagtccatgatgtgagcgctcccggccgtcgagcttttcctcgccgaccgacacccttctccccacccattggcggatgcccaggagggttgggttgagatgggaggaggggagtgaagtgga

SEQ ID NO: 75964 - DNA, 431 bp, Oryza sativa
  unsure (1)..(431): unsure at all n locations
gcagcttactaagataccctgccccttttaaacgcttggaaatgaaggaatgagttgcaccagaatcaaacaatattactgccggtgtcgagttgacggggaatgtgcccaatataacctctggtgctgactgcgcctcctctgcagatgcatgattgacacgggcctgaacgaacttgagtctggcacgtcttggcttcgggcacatacgtaccatgtgtctaggctcgttacaattgaagcagagttcgggcttttctccaaactttntgggctgttcttgctgagctgactgaactgactgagctggaatcattagtggacttggagtanggttgaggctgtgctgctcactatttctgtgactgccactgttgttgatgctgttgaaattgtccgggtggtaaggacgatggtgccggataatcatg

SEQ ID NO: 75965 - DNA, 416 bp, Oryza sativa
agcttcatcaccttccttgctcacacgttcttgctgctgccggtgattgtggcatatctcccaatgtgtacgtctcaaattatttcaggaaagaagcaatctttcatacatggagtgaggagatatatgggttcgggatctcaggatcttacacaacgctgagtgcccaagttttttatattccagatccatctaagttaagggtgaaaaagggtcgacgccaaactagacgcatcagaaatgatatggatgagtcaaaagcaggtgggaggactttacgctgcagcaagtgtgatctgctcggccatacttacaagagatgcccgaagaatgcagaagtttcaagcggcgcaaatgctagtccatctggacaggcaagtgatggtaggcgaccacctggtgaaggaacaacaagc

SEQ ID NO: 75966 - DNA, 450 bp, Oryza sativa
  unsure (1)..(450): unsure at all n locations
agcttcctttagtagatcaatttccttaactcgaatatagcaagaatccgacaactaacggcttgacaactctcatcggctaatctcaagacttcgaagccgatgctgactctaagccgatgttgttcctccgttaaattctccactgtgaccatgatcttggcattgacttcttcttcagacatgtggatataaaactcgtgtcccactgggcgtgccaatttgtgttgacgaaaaaaatcgaacacaccggcctgcttagctcctgtgcaggtccaaatcttaatgagatgcgggcgtgcgagtcagtttgatcctgcaactgacaagatatgcaaatagtagatcaaaacagccgatcggctgacaagccgatggagtagttctagccgatagccgataatagccgntgccgataccagccgatagcgatagggtttaagcaatcgg

SEQ ID NO: 75967 - DNA, 431 bp, Oryza sativa
atcttaagcacctgggctgcagcttttattgaacgcccatatttttcttccaaggccgtctaatggaccaaccttaatatcaccaaaataaaattaaaaaaacacacaatacataactgcaatgttgcaacgactggcaccctccctcgaacatggacaccaagaacaaacaaaagagctatatatcatgaagatcgagccactcttttgcagaatgcaggaggagatggaagaagtataaggagaaggaaaagagaagatggatgagcaactggtttgagtgaagcatagctagccttctttaatatagctccttagaattagagagagaggagagggagggaagaaaagagcatggtggaatgcaatggaaatgcaaagggtgatggagtgaatgagccaacaaccgaacaaagagggggttgggatat

SEQ ID NO: 75968 - DNA, 446 bp, Oryza sativa
  unsure (1)..(446): unsure at all n locations
agcttgggcagcgcatctcatatttttatgataatggaataatatcaagcctttgcttccaagaaactacagccacttatattacagagtcagctaatcaaagagcaaataaaattcaggaattgaaagtgcaaagatgagcgcggatgataccggagaccaggatattatggtgggcatatgctctgtttccatggagaaggaattgggaacaatttgatctgtctgttctgctaacttgtcgtggtgatgagaacatgttgtgcgtgatgtgaaatactccctccgtcccattttaagtgtagccacgaatttccatacccaattntgatcgtccgtcttatttgaaaaattnttgaaaaaaatattataaacataagtcgcgcataaagtattattcttattttattatttcataagcagtaaaatactaattatgaaaaaat

SEQ ID NO: 75969 - DNA, 442 bp, Oryza sativa
agcttcgcgtcgtgctcattccgttcttctttatcagccacatcgggcccttcaccgacttcgccgtccgcctcgccgcggcatggccggacgccgtcgaggccaccctcgcggtcacgccggcgaacgtgcccgtcgttcgatcgctgctcgagcggcacggtccagccggcgcggggtcggtggcgatagccacctacccgttcccggcggtggacggcctcccggcgggggtcgagaacctcttcaaggcggtgcccggggacgcctggcgcatcaacgcggtggccgacgacaaggcgctgatgcggtcggcgcacgagttcctcgttatggagcttcgccctgacgtcatctgtaccgacgcgcactttttctggaacgccggcctctctgaccagctcagcgtgccgagcgttatgtttacaccataggtgcttct

SEQ ID NO: 75970 - DNA, 425 bp, Oryza sativa
agcttataccgacaataacggccaaactgttatatgtaccttatactatcattcacaataacggaatagtcattaagtattcagaatgactttttttttaaaaaaacaaacacttagtgtataagtagaatgagaaaaatatttcctttggtttcttttttccttcttaaaacatgtgacgattttcttgttccataaaagaggaaagtttggcaaatatttacccttgaggacatggacaacaaacctatcaagaaagttcataatgcaattgagcctcaatctaccatttttgtataacttttgagttctatatatatatatgcaacaaagctgaaccatcggtttctagctccacaatcataccccccacccctgcccattggggttcacggagcagatgcatatatataaatcacatgtta

SEQ ID NO: 75971 - DNA, 368 bp, Oryza sativa
agcttgctcaatccagcacgcgtttggactctgcgtaagacgaggtcgtcgacgcagagtgatcgggcccggacgtgacgctgatggtagcgccgcaagctctgctggtagcgcgcggctcggagggccgcgcgccgccttcgctcttccaagtagtcgaggtcatctctgcgaagctgatcttgatcagcctcgcagtacatggtggcccgaggagacttcagggtgagctcggatgggagaaccgcttccgcgccgtagacgaggaagaaaggcgtttccccggtttctcggcttggtgtagttcgggttgcccagagcaccgctggcaactcctcgatccatgaatcgccgtgcttcttgagtat

SEQ ID NO: 75972 - DNA, 430 bp, Oryza sativa
  unsure (1)..(430): unsure at all n locations
agctngtcaaggtttccaatccagcctatgagacttgggttgctgaagaccagcaggtgctaagttatatgttggcatcggtatcaaaggagattctgactcaggttgtcaatatagagacaaccgctgaagcctagagggcaatcacaacgatgttgtcctcccagtctcgatcgcgtgctctgaacacgcatctcgcgttgtcgacaactcgcaagggtgacctcagcgttgcagagtatatcgggaagatgaaatcattggcagatgagatggcatctgctcggaagccgcttgatgacgaggagatgatgtcttatattctcgctggactcgatgatgactatgagcctgttgtgtccaatctggttggaagggcagagccggcttctatcacagaaatctattctcagcttctaagctttaaagc

SEQ ID NO: 75973 - DNA, 442 bp, Oryza sativa
  unsure (1)..(442): unsure at all n locations
agctngaaccctagttgctataacggcactataagaacctaccactgaggtaacccaaacttactgattgctttagctttcacagctatttacccagtagatatgtcagcgccaatgaagttgacgctgaagtctcctgacgtggcgattttgtgccaccttggacaatatcttaacaccaaataccttggcgctgagacgttatatctcagcgccaaacgccaaacccgggggcgctgaggtcgcggcttatttttggaatagtttttgacacggtctattcttataataagtttgttaaaagggtcaatttgtcaaatttttggtccaggacgtggtggtgtcaaaggataaatctcactggtgtcatccattanagaacatcatagatacttgcgttaaacaagaatccattggtgccaggtgacaccacacctaacac

SEQ ID NO: 75974 - DNA, 442 bp, Oryza sativa
agcttaagatgccacttaagattaagatattcatgtgttacttgcttaaaggggttgtgttaactaaggataatttggcgaggcggaattggaatggcagcttgaggtgctgttttttaatgaaaaatgagtctattcaacatcttttatagattgttattttgcgtagttcatatagagagcagttcagttctcttttggttttaacctctctactaatatgtcatattttttatgcatggcttttagtaatgaactgaacaacatgtacaaatgatgctaactttccttcacaattctcgactatacacacaaggtctcatagttcagttggtgatggacacatagcgatagtagcttgtgtcaatgacgaattctttcacatttagaccaagattcggtcaaacttttaagttatcaccagtgacctgttgttgtgttt

SEQ ID NO: 75975 - DNA, 402 bp, Oryza sativa
agcttagcttgttttaattagcattactcatgtacaaaagaaaaacattgacttaaaatattaaaggaaagtggtgcatctaccaaaacataaaaagtaatactgaatcaaggttggatcaaatgaatgctagtaaaaataacaggactgccttcttggctgaccaagattttatcgattcagattggaggacttaaaatgaatcttcttgctaaagaacaattacccacgcgcatagtacaagaagcctctaggaataattgaaaccattttagtatgaaacatactcgatagtcgatagggcgctttgaatcttcccagattttggctatttccattttcttcttcattgttttttcctgctcctgtgcttctatcaattcctcctccttcatttcatat

SEQ ID NO: 75976 - DNA, 373 bp, Oryza sativa
agcttgccctcgccggctccacctcccggatctgcgagacgtagccgcgcccgtccaaatgcagcttgttgatcgccgacggccgccgcggccgccgggaaagcgcggaggacctgacggactctagcatgaagagcgagaaggaggcgacggtgacggccgcgaccacctttttgctccagatcacgaggagggcgagcgacaccacgccgacgagcgagacgaaccccagcccaaggccgaacacgcggaccttgggctggcgggggaggacggtctccaccggcggaagttccggtctcggtctcggctgggttggcggcgagaccgagacaactgccgcaggcggctgggattgtggtggtggtggtgg

SEQ ID NO: 75977 - DNA, 434 bp, Oryza sativa
agcttcatcttgccaccgtccttgattgtcaaccggccatcattaatcgccgattgtatctgtcaacgaaacacattacaatcattagtagcatgagaaaaagaatgatgccatttacaataagcctttctacccagctcttcggctgacggaatcacatgtccctctgccagtctaatttgtttgcattgcaacagtgtatcaaaaattttatcacatttactaacatcaaaagtatacttcatttctcctctattagtaggtgcaggtttcagggcagtacacacaaaaggttttgttttagatgtatgcacccattcggctacacatatgtcagtatcttcgtcactagccaaatcctcatcactacaatccaaagtattaaccgcatggttttctatatctctattattgccatctataaaccggctata

SEQ ID NO: 75978 - DNA, 445 bp, Oryza sativa
  unsure (1)..(445): unsure at all n locations
agctttntacgtatttggtaaaaaaaattgacacatagtaacctaaaggtacatgagaggttccgcgtccgtgtaatgagatatatagtaagttgactatgtatagacatataaaagagctcctaggtttcagtctcctatttcacatgttgttttcatgaaaagaaaaaattgtgcgacttatgtggcactaagataatcgagactaaagtttggatctgtataactttntaaattgtgagattcatgcaagtataactttttatttatgaataccatagtagaaactaaatataaactcggggcatctacaanttgtatttaatagattttaacttgaaaggtattaaattaatagaatagaaagtgagatggaatgaaaggttaattctaatattctagatatatatattttntaaaaaaaaattaaattntggagctgtta

SEQ ID NO: 75979 - DNA, 437 bp, Oryza sativa
  unsure (1)..(437): unsure at all n locations
agcttcgntggtagatgtgattttaatcttacctctgtagactatcttcgaacatatcacttggttcataactgggaatagctcccacgaacaagcaactcggattcactttctttacattcagtttacttcccattattatcttcaggttgtcctcagttagcattcaacgtattcctttacacctttagccttgatgtgttctttcccattggatcatctcccaagacatggcattgcctggtaaccggagcttgcacttttcactccgtgtagcatctgataccgagttgaagatttcactctttgccttcatagaaacacttttacctaggtcatcttgcttacttaatgacaaggtgactgttgcggtgcaattacaatcaggggtcttccttgagcgatgcagagcatgtgtttgtttatcaatcaccttt

SEQ ID NO: 75980 - DNA, 444 bp, Oryza sativa
  unsure (1)..(444): unsure at all n locations
agctngagactgtgccattggcgggcgctgaaagggattacggttgttctggtttccacaattgccttggctgaaatttcctggctaatacggcctgtgctgtctaacaatcatcattgtaggaccactgcgctgtcctggaccgaagcggggcttctactgtccaccttgctgactcctgaactgtatagttttcctcttgcgatccatcttattgcgctagtcttcctgacgaatggctttgcccacaagtctctcaaaatcagcataatctccagaaattaactggttagttaactcgtcatccaaacctgctaagaacttctcccgtctctcggcatcggtacgcacattctcaggggtataacgtgctagacgactaaactcatgcagatactcagtaacaatcctgtntccttgatgtagagatctaaactctcactt

SEQ ID NO: 75981 - DNA, 439 bp, Oryza sativa
agcttgatgctaagactagcatcgcatttcatttgagtcaacgctctttcccttcttacacaatcctcaggttttaccaaactaggatctcgaatcccctccttagagcaaacaaaatgcctgtattcgatggctccaactcttttttcacgcctcacaatatccttcctcacactaaaacctttccttttagcataactattgtagaagttgtaacattcatcttcagtctaaaaattcatttgaactatattccagtactcatctagagctacattatcttcctcaacgctgtggaacacattgtgactgcaactaggatcattaggctgagatttattgtggtctctctattataaaaaaaaagtatttaaccccaatactatgagctaacgtgatagaaatctaaactacaccatgtataaataactgcataaat

SEQ ID NO: 75982 - DNA, 429 bp, Oryza sativa
  unsure (1)..(429): unsure at all n locations
agcttgtgacaggcactctgttgtggccaaatggcgagcttgagcacgtatgcccttttaaaagaaaataatgacacttagcaaaagtgcaaaaccctgcatgaatttactntattccattatggtcaatgtatgcatttacttaacacctttatgatagaaatgtgtattttggctcctttcaggtttcatttgtcttcttcatgtacatctggtgtgctgcaacagacccagctgacccaggtgtcttgaaatcaaagaagtacctaagattgtatggaagcggcaaacacaagcatccgaaggaattcagacatggcatttcagattcagggttgcaagtagagggaactggagaaaagcaagaacatgagtttgcagctgctagtgaaaagtcaacaactcgctacaaagacaataactcatctt

SEQ ID NO: 75983 - DNA, 439 bp, Oryza sativa
  unsure (1)..(439): unsure at all n locations
agcttgcttcttgttccagatntgatctgatcctaaaataggttactttgctttccgctctatcggaaaacgttctaacgtattgattccgtaattctatttcaaaaaagagtgagactcaatctccttatgccatcccacgctaccgaagcagactcgctccgtctatgcgtcctgaacccgaagatagagaccccagctagacctatttagtttagttgcctcgggtgagctgaactaccagaactagttctttacaactcgtgccccggagccctctatctagaatagctctctctagatttcccagaaatgttaccagaataagttacaactgactatatcttcttttcccagcgacgcgccctcccactaagctctcaaccaatccaaggttaagaaaagaaagaaccaatggaatagttgcgaatagatcagt

SEQ ID NO: 75984 - DNA, 450 bp, Oryza sativa
  unsure (1)..(450): unsure at all n locations
agcttctgtcttcgcctccctaacacgaataccttcaaaagaccctgnggcaaccctcagcccaagcctgaattttctgcttcttatccagctggagttatcagtgaaaataagctcccctatggttccaacaccttctttaagggtcacctgaaggtcacctgtcaaaagaggtctcttcccttcacgctccttgacaatgtgactctcaaactcctcttccgtccaatcctcatcttcctcgttgttgaagtcaccctcaagcacaagaacatccagttttgcacacgattcaggccctgaagtaacagcaaccccagtgttcgcatctagcagaacaacatgtattgctgccccctgctcaccttctacttttccaccagtaaacagtggtagagataatctagttgtaaatntaagctgaagatttctcccatcaggtccttcaat

SEQ ID NO: 75985 - DNA, 425 bp, Oryza sativa
  unsure (1)..(425): unsure at all n locations
agcttcgtatgatttatgttccctaatataccaaactgagtatgaaacacccatgtaccatttgtttttaataggaattaaagagaaaaaattacaagccctatactccgaatactttaggttattcccatactgtcctaactgctgaataaaatggaccccacattttgagcttgttcatatgatgatataatccatatcactaatttttcatgatttttcataattctcgattgccatgcaaagcaccaatatgacttgctacttttggacattgtagatntaatttaatggtgcatatttatgaaccaataatggatatatagtgatatacctatatactgttctttttcaaacttctcaataatgtttgtaacatacctgtgtacgtccacgtatagagcctgggtggangttgagttggg

SEQ ID NO: 75986 - DNA, 448 bp, Oryza sativa
  unsure (1)..(448): unsure at all n locations
agcttcgctagattntattntccgctacagttttcttcatgctgaggactaagtgcctcttatgtaagtatttattgttttatttattttgatgaatctgtatattcctcggctgattcctggacgagggttttaatgcacaaattagttcggaaattacttgtgaatttctgggcgtgacataaattaatgaactcttaatataaattctattaataatttattaaataatttataaatcctgaaacgaaaattcagggtgtgacaatgtgcaagaccacccccacacttgtctttgtgtatgggactttattggacaaaaatgaaaacaaagacaaaagtaaagcanaaaggactcacttggttggaagaccaacgagccaacttttatttatttattatanttttattatgttaggcacattataagaatagaatgaaatgaaat

SEQ ID NO: 75987 - DNA, 437 bp, Oryza sativa
  unsure (1)..(437): unsure at all n locations
agctntgccaacaatagttcatgctacagcgtgattaccacagatgcctgaatgaatatcttttagcaactgtcttccctcttccaaagatacgcagcgttgcaggattcctgatggacttgtacaactcgttctcgtggactacatagagtctgctgcgcctggaaatctgctcggcttcatttttgtcttgagggagttcttgtttggtcaaaaatcttatgagaggttctctccagtcggcttcaatcatgcttacggcttgagtatccatggcttcaattgtttcttttctaggcacggttggttcataaagatgctcaacgaacacattagaaggggctgcttctcgttttgaaccaaaattggccaatctgtttgctgcctcattattgtgtcgaaggacatgggtgagctcgagtccatcgaatttatct

SEQ ID NO: 75988 - DNA, 466 bp, Oryza sativa
  unsure (1)..(466): unsure at all n locations
atccttagagcacctgcggcatgcaagctntggttaacgtcagacaacgtgttgtaaaacantaaatacctccatgcccacgagtcaccgaatgaatacaccccaataaactaaagttgtaaataacaggatagctaccaattacaatacaaccataccaaagagcaatcagactatcagagtgagcagatacaaacaagtgtgacatctagctagcagaactgcgagtcagcatattttcatggcattatgatacagagtaaaatcaacctgagtcagatggagccgcaccacacttctatcttctaacagtcaatccagtggactagaatcattgtcttactgggtatattgaagcctgaggatgttgtcaaactcaggcatgcagctctcagatcaggctttcactgcagcagcttaaggagagccaggttctctaccatgcaccctgaagcgatagatgcat

SEQ ID NO: 75989 - DNA, 426 bp, Oryza sativa
  unsure (1)..(426): unsure at all n locations
agctttatgtgcacttccaccaactaatacttggccagtaactgactaactgccgaaaagcagccttgttaaaagaataacttttctgcatttgctttcaaggtaaattatgaatttctttttccttttctgcccgaaaattctcttccagggactgtcgtgaagcttctcccctgaatttgttagctgtagcatgtgacaatccaattattgtggactgtttaaagaagaagcagtacaagcttttattaaataattactttaggaaaaacagagcaacgttttccatgtntgttcagtgtactattatgaactgtggtttctaggagcctaatgggaggctgctgatttntaattgttaggtttggatatcatgaaagatcccatnatggagaatatttgtatatagcatacatgaaacttatc

SEQ ID NO: 75990 - DNA, 429 bp, Oryza sativa
  unsure (1)..(429): unsure at all n locations
nagctcgacgagaaggtctgncgatggctgttcctgataacgtgatcgtggcgctgccggcggaggctaagtccggtaagtcgacactgccgtgggctctcggacatttacgggccacggccatcgtcgtcacgcatgttcatgtgccgccgcaaatgatccccgtcagtacgtaactgcatcatccgattgattttcttctcttcttctttcttttctgaaagatatcatggttatatgtatggttgtccggccaataattcatggaaaccatggattaactcacgggtttgtgactcctcttagccctttcaattcagaagactgagaaatttggctataatctggctagtgttgtaatgattctgttatggtcgcagtgggagccaaggtccatgccagtaaactgaatcccgagcaagtgagctt

SEQ ID NO: 75991 - DNA, 374 bp, Oryza sativa
agcttcacatcttctataatatttgaaactatcttcgatcatcctcggccaatagaacccttctctcctaagcaaccaattcatcttatgggccgattgatgagttccacaaattccttcatgtacctttcccatagcaactttagattgatcatcatctaagcacttcaataacacttcatctatgtttcggcgatataaatccccatcaagcaatgtacatttgaacgcttgccgccgaatctttcaatcaaccttaagcgtaggatctttcaaatatctaatcaaaggaattctccaatcttcttctgtctcctggacacaaatgtccgaatttacaattaatttggcctttgaatcaattataacgtgcc

SEQ ID NO: 75992 - DNA, 431 bp, Oryza sativa
  unsure (1)..(431): unsure at all n locations
agcttgaggtggngtttggatctaaggactaaactatagaccctgtcatatcggatgaatntagagtattaaacatagactacttataaaactaattacataaatgagagctaattcccgtgataattttattaagcctaattaatccgtaattaacacatgtttactgtagcatcatataggctaatcatggattgaataggctcaatagattcgtctaacgaattattccatggttatagaataaggtctattaatagtctatatataatatttataatttggtcctaaatatccgatatgatagagactaatacagtttatgtccatcctaacaatatcgagtagggatgacactactaaaaaaagcattcttcgcgacgtggggatttcattttccaggcggacatacccttaaaccaaatgacgct

SEQ ID NO: 75993 - DNA, 430 bp, Oryza sativa
  unsure (1)..(430): unsure at all n locations
agctttattttttttcaatcgtacgtacactacttatgtagntatgttttcttttgcaacagttaagtacatgtagatctggtctaccaatgtaaatgaaaatcgatggtgaggttagatagtgccacatgatggtttaggaacgttggtagaaatgacacataagatataatataggtgtggaattggtgatttcattaagaagactatagtcgctaaagtgtatcataaactactaaatctgtagtttgtctaaaaataattgtttatttacagccccagatcacttctattgtaaattcctcgcgtttgcacgttcacacccagctcagtctctatgaaaaacatatctaatattttatgataacaaattatgatgtacatgtattgtgtaattaagaaaaaaaaagagagaatcaggagttggatg

SEQ ID NO: 75994 - DNA, 438 bp, Oryza sativa
agcttgacgcggagcctgctcccttggtcgtgattggtgaaggggctgttagcaagctcgaagaagagggttcgccaagcacataaaagacggtgttattggcaagctctggtgagggttgatggatgcggatcgacccaactgtatcttgatctggctacggctagttgaaatttggaggtatctctcctccccgatgtcgacgagagtacgagaccaaggtgtggttcttcaattctctcctccatgaagcctttgccgtcccctcctacccaagctccaccactaccgccgtcggcactctcctcgtcaagctcagggagctcgtagatggcttcctatccaagcgccactaccaccctagacccagcacccccacccccttccccttcttgccgagttaaagagacgggtgccggcagcacggccttgatccca

SEQ ID NO: 75995 - DNA, 437 bp, Oryza sativa
agcttgctctaccggtgatcacgcattcatgatcaacatagcctggggtcccagagacggcggtcatcgtctgcatccccacggcatggtcgatgaaccttgcaagcccgaagtcgcctagcttggcattgaattactcatccagcatgacattgctcggcttgatgtcacggtgcacgacacactgttcccactcctcatggagatagaatagtgctgatccaagcccaagaacaatcttaaccctgtgacaagttaagaccaagttagctgagtttaacacgccaattaatttaacatcacaaaggaagtttagatgaagttaaagagaacaggtactaacctcatcggccatgttaggaaggtgccattgccatggaggtgaatgtcgaggcttgcggtggggacgagttcatagatgagtaggagctcgtcgc

SEQ ID NO: 75996 - DNA, 448 bp, Oryza sativa
  unsure (1)..(448): unsure at all n locations
agctntccctagacactatttcttactagtgatatcctctctttcctggcctatcatttgcttggtgtccttggttgaactagaggaagatctgatcgcacacgttcccttggattcgatacccttggaatactccgtaggggaagtgatacatcggtatatccatgcgcttgcggattttaactgtgattgtaagaaataccagtaggtactggcagataggtcgcaatcagtattcacagaacttattcatcacaatcagtatggctttattagaggcagaactatacaggattgtcttgcttggtcctttgaatacctgcatcagtgtcaacaatcaaagagggaaatagtgctcttaaagctagattntgaaaaggcttttgacacaattgaacactctgttatcttgaatattatgaagcaaatgggttttgactctaaatgt

SEQ ID NO: 75997 - DNA, 453 bp, Oryza sativa
  unsure (1)..(453): unsure at all n locations
agctntaaggtgcaacaaaatgcatgggcccatctcataacaaagttatttgttntcaatacacagggagacccaactatacacacaactataagctcaaaattaacgtcagaataaaataaaatggttggtcatagcacaaaaaagccacaaggtttaaatgcaagcaaatattttcttttcacaattaagtaagcataagttcaaacaaaattacaaaaattgccatttcagaagtaaaataaagctttcaactctaaagagaagttccaaaaagagaaactttgtaattgaagaaatgattcaacgaaaggacgggaaatgaaacgtcaagggagaaacctagtaacgtttgataaaaaaagccgcaaggtttagatgcaagcaaatattttcttttcacaaacaagcatagattcaaacgaaaatttggtaatttacatttcagaacta

SEQ ID NO: 75998 - DNA, 477 bp, Oryza sativa
  unsure (1)..(477): unsure at all n locations
gagactctatagagaccagctggaggcatgcaagcttctctcaatcagatcaacttgttctctgaaatttctgcgattgagagttcatatatattcttcttggaatggtctaagaccatatatatttgtagctagctatcgagctagcgtgttctgatcttgtcaacgatgaacacgagccacaagcaaaagtacgggtctctgtctgcaaaaaccgtgtgctgctcgcagctgataccatgcattgctgttggcgcttgcactgcactacagatttattcttcctacacagattcgtcagacaagagtactagatcgagcagtagacacgaacagatgatgaacaatcttggatcganttggagtcgtcagagcatcgatctgggccgaatgtaacatgggctcgtctggtgggctgaagcccgtaacgtaacatgggcctcaattgaagcccagtaatactgacaccattttgag

SEQ ID NO: 75999 - DNA, 384 bp, Oryza sativa
  unsure (1)..(384): unsure at all n locations
agcttcaaacaagccaagcagttgtgccatctgattccaatgtgactgctacagaagtgaaagaacttgctgggagttcatcgtccccatcactaaagactggtggagtatgcaatattacttttgtaagggtggcagaaaaacatcggcgcctcctcaatgtgttcattcgacagaatccaagtttgctagaaaagtcactttctatgatgttgaaagtaccaaggctgatagactttgacaacaagcgtgcttactttagatcacgcattaggcagcaacatgatcagcatctttctgctcctttgcggattagcgttcgtcgggcatatngtttggaggattcatacnaatcagtgaggttacgtcgtagccaggatctta

SEQ ID NO: 76000 - DNA, 154 bp, Oryza sativa
  unsure (1)..(154): unsure at all n locations
gaaaaaaaattanaaaaaaaaaaaaaaagaaaaaaaaaaaaaaaaaaaaaaaaaaaaaaaaaaaaaaaaggtataaaaaaaaaaaaaaggacaaaaaaaaaagaaaccaaaaaaaaaaaaacagaaaaacaaataaaaaaaacaaaaacccaca

SEQ ID NO: 76001 - DNA, 448 bp, Oryza sativa
  unsure (1)..(448): unsure at all n locations
agcttgctntaatccataaatggatttctttatacgacatcccatattttcgtttcctttcatgacaaaacctttcggttgcgccatgtatactttttcctccaaatctccatttagaaatgccgtttttacatccatctgatgtaattccaaatcataatgtgccactagtgccattataatcctgaaggaatctttacaagagactggagaaaatgtctcattgtaatcaatcccttctcgttgcgtgaagccttttgccacaagtcgcgctttaaacttttctatattccctctggagtcatatttggttttgtagacccatttacagcctacttgtttggctcctttaagaatttcttctaaatcccaaacatcgtttagtttcattgatttcatttcatctttcatggcttccaaccattcagatgagcgagcgcttctcatg

SEQ ID NO: 76002 - DNA, 428 bp, Oryza sativa
  unsure (1)..(428): unsure at all n locations
agcttaatcttttgatcacatcaatccgtatgttttcaaaataacactgacatgttacataacggatgtgatagttttgtcttcacatgtcaaccaggatggcgtaaccaaataacactaccacattgtgttgttttattacgtcggtatcttgaaaataagttttaaaaatactttnttccctaaaatttatataaaattaaaagattaataaaaaaatcgtgctgctaggggacatgacgtcaccgcctacgaaggccccacccgccagcgcggcgcacacatgggggagtggtggggcccaagacttcgcgatcgcgcgagtacgcgtccacgtggggcggatggcccacctggccgtcatgtattactccgccgccgtggacccggacttcctacaccccatggatgataacgaagaatatgct

SEQ ID NO: 76003 - DNA, 461 bp, Oryza sativa
acccggatccttgagtcacctgcggcatgcaagcttatcctctatggactctacaagcatgtcaccgttggagatgtcaatactggtatgtatactgaatatttggtattattcagttgttacttctgttttgccaggcatgttctggatgtgtaacacaattcttgagttaatgacttgctgtgtttgattacattcagagacatgggtacaagtttacatgccatggattatgatcctaacacaagatctcatagatcaccatgattttttttatcactcccccaaaaaatctgtctgatttgaaacaagaccattctttcccatcaaaatttttgggatgtagtattgagtacttccccatttttgtagagttgtaatttacaagtgcaaccattgatattgacctgcacactacaacatagaaatttgctgcatctagcttctgaagtctgatagct

SEQ ID NO: 76004 - DNA, 441 bp, Oryza sativa
agcttcactacagttgcttacattctcaacatcaaacacaaagactttccggaggttctttaagtccttcagctcagatattttgtgtccttcttctttcttcacgctcaacccattcaactcacgaagattagttagtcttccaatatgagggactctggataatgcaggttttggaagatacagtttctgcaagttagctagattgcataaatcactgacgctcgcctgttcttctccttctatcttcagtagcttaaggacctccaggtggaagagtttaaacaatttattcagattgcttttgttagtagcagacatacagatgtaccttaagtgctttagttccgcaatagcatcatttatgtcaaaccatccatgtccatcaaactttaagagccgcaagcttgttatgcccttcattgctttcttaagattatc

SEQ ID NO: 76005 - DNA, 454 bp, Oryza sativa
atcctcagagtcacctgcggctgcagcttgccctcggatgtgggccttttttatctttgctcgacgcggagaagtcgcttaccaggtggagctgtccgcctccttgggcaacgtgcatgatgtgttccatgtgtcgcaactcaagaaatgccttcgagtgccatccgagcaggccgactcagagcaaattgaagttcgcgaagatttgacctacgtggagaggccagtgaaaatcctggacaccatggagcgcatgaccaggaaccgggttatcccgttttgcaaggtccagtggagcaatcacgccgaagaaaaagctacttgtgagcgtgaagaccagctgaaggcatcccatcccgatctctttgccagttctttcgaatctcggtgtcgagatttcgcttaaggtgggtagggttgtcacgtccccaatcgactcttaaatacatcctcg

SEQ ID NO: 76006 - DNA, 425 bp, Oryza sativa
  unsure (1)..(425): unsure at all n locations
agcttacttcacacggccataggaatacgctttgcatacacgagatgacgagaagactatttgtcacgttactcacgtactccttctggtaaaataaaataaaaaaaaatcaacctaggagcgtagtctagattcgttcatctaggaggggtcagattcgttgttctaggaggatcacattacatccctttntaggttaagtttttttttttggacgaaaggagtatgacgtaagcttgccagtatctatgtaatttttttagagtacatctatgtatatatgtgtttttgaaatatcatatagtggtgttcttttcttttaatgatgaagatntaagtttttacgcacaacgatatagtattaacgtatgatcgattgagttttaattattacaaacttaacaaatagatcaatatgatatttt

SEQ ID NO: 76007 - DNA, 446 bp, Oryza sativa
agcttacatttggctgatagcaccagaagaatcagagatgagagatctatgtggcaggaacagtttgatataattaataagtttccagtattcacaaaactcctatcccaaaggcacaccttcataatgttttagtgaaaaaggatttatctcacattccacttgacacctatgaaagtatgctaatgacaaaggaaaaaggtacgaaaaactcagctcccaaatatgaggtaggcctctaacaagttttcatgtgcaacacctcacccaaatacaactgacaaggtaacttgtcagcccaatcaagactatatggttcatttcagaaataactactattcaatagatatatctactgtacttcaaatgggaatttctccataaatcctaacaagccaacttgttctataggaggcatgtatgctgctattctgcttctctctact

SEQ ID NO: 76008 - DNA, 455 bp, Oryza sativa
  unsure (1)..(455): unsure at all n locations
atcctctaagacacctgcagcatgaagcttgagcctaggtgcaagtanatatctatcggagagaatccattgaatcccgggaaatgcttttctcctagcctttcgtaccacgtggggtcacatactaagcaagccaaaggctagaagagtaagaatcagaagagaaaagctccgatgcgaactgaagaagaagtacgttagatgactattaccagcaccgaatggccttcagcagggataactattcctagacgtcaaagaggaaatactttccgaggtgcacgacagttgacccancacctcttaagccatggtggcagagtatctgatagtgaagggtcagatcaagtctcctcggatgatgaagatgagtcttcccgacatctcggcgaggagagatggatcaaaggcatgcacccggtgcggcgaaattgaaacgttgctagcgtgagtct

SEQ ID NO: 76009 - DNA, 221 bp, Oryza sativa
caaaaaaaaaaaaaaagaaaaaaaaaaaaaagagcaaaaaaaaaaaaaaaaataaaaaaaaaaaaaaaaaaaaaagaaaaaaaaagaaaagaaaaaaagaaaaagaaaaaaaaaaaaaaaaagaaaaaaagaaaaaaaaaaaaaaaaaaaaaaaaaaataaaaaaaaaaaaaaaaaaaaaaaaaaaaaaataaaaaaaaaaaaaaaaacgaaaaaaaaaaa

SEQ ID NO: 76010 - DNA, 438 bp, Oryza sativa
  unsure (1)..(438): unsure at all n locations
agctngcatatcatgatagtatgnaagaacagttctggtatcttgttttaaacattgcagtttgttgaacaaaatgtcagcataatacatgggaacataaacatctctgaaatatagtttcaggtctttccaagattgtggtattttgttatgcctactaagatgtttccaatcattagaagcatgtttaattaaaacactagaggcacacataaccttttgtttctccgacaagacatgcttttgaaattcactatcgaccgctagctcccaattaatgtaagcacgaggatcatagtttccctcgaaataaggcagtgcagatttgatcttacctagaacatcatcacttacctcataatggtcatgttgatccctcctcatgtctcgacgaagatgtcgatgttgagcgcagctatcccaaattatcttgcgtat

SEQ ID NO: 76011 - DNA, 445 bp, Oryza sativa
  unsure (1)..(445): unsure at all n locations
agcttgngagtggctagaaaaccctagaacattaatgaacagaagtggaatggccaaagggtgacctggggatgaaatccatatatataacgactaggtgacgtcatctagccgttactcacaagtttgaactggaaacctgccaggaggttccgggcaaaagtgccaggaacttctgggcagtacttaggaaattttttgcaaataaacggcgcccggaagtttcggccagaacctccgggtagccctctctgtcccgaggagaaaatcatttttcaaaaatgattccaaaaatattttgactcatggatatgactaagagcactntgtataccctagaaccacacttgaaacccctcttaatagtacggttttttctaaactcaatttcaaaagtgaaaaacctagtctaatcaccttcggtgttttttgcacttaagaacat

SEQ ID NO: 76012 - DNA, 445 bp, Oryza sativa
  unsure (1)..(445): unsure at all n locations
gaccggatccttaagtcacctgcggcatgcaagcttggtggggcttttgtttagatgatgttctttntttatgtaactcattcggatttttattttgtttagtgaaatataattggcatctattctggtggttaggtttcctttaaaaaaacaaagttacttctccgtcttaaaatataagcacatctcaaatttgtcatgtacatcaaagagataagtgaagtcaaatagggatgcatagtactatgtacagaaattaaatgagatatgattgtaatcgtttgaaatgagatagtagatgaaaaagtagttgtattgtatttttaagataaaatttaaatactagaaaaggccttttttgtgacagaattgagttatacgacaaatggatgtggccatgtgccattaaggacaagatcgacggtgcacgtanggtataactctc

SEQ ID NO: 76013 - DNA, 415 bp, Oryza sativa
agctttcattttttagacggctgcaattctcctccgctatattcgctagataacatggctcaattccttctacccgtcgggagcacggaagcaaatactcgaattttaccacgcgtttctctccccgataaaatggctctgaattcgtacgacgagtctgcaaaatatccaatactacccaatgtgcatcgcgtagtaaacgcgctgccgtcaatacctggaattctccgcaaaacggccaaaatcccggtcattttccgcgcgtttgcttgcaaacctctcctaactaccaggccgcacaacaaacgaaccgaccgggcctgccccttcctccatagtagttccatcattgtctcgaagcccgagttcgacacgtgcttacgctagtccggcagaccgggtggaggcggatctt

SEQ ID NO: 76014 - DNA, 437 bp, Oryza sativa
  unsure (1)..(437): unsure at all n locations
agcttcacgaggattgccgtgcatggatagagtcttgaggaggcaattgtatctattaattaggatattttatgtaatttccttagagatatgttcgggcaaaggtctgccgcaaagacttatggtatcttagagtttgttagagataagagtcgtgtccgatatggacatattttgtaatctcggatataaatagaccccgagccccatgtaatctcggcgcatcgccaccctttttctttcattttgtttcgacaagttcttgctttcgggttgagctgcatcggtttcgatcttcaacaagaggtaaaacttgttgtggcggcttgctttctcgggattagtgcttcaatctttatgatactctaatcttgtttatgtaattcgncgagttatcatatatcttacataatctncggcaatattgctatctaacc

SEQ ID NO: 76015 - DNA, 415 bp, Oryza sativa
  unsure (1)..(415): unsure at all n locations
agctnttcatcaatcccatctggcaattatctctgcgggtgattcccacaacaacggcgatctacatcatctaatcagattccgcaacaacggcaaccctcatcgctagcccacgctcacgggattcgcggaagtccttaagcccgtaggataaagccattaagaaagaactactaagccagcctgttccattccagatcatatggtcaacacgatcgctatggcgctggaatgccatataacagttgttgtttaaccttatgatgataaatatatacaactgaacccccaccacatggcaagttcagaatacatctatagtatgactgactgctccaccagtcaatccaatccatcagcatatttatttttaatcatagaaactataatttaatgcaatgtgatacatatagat

SEQ ID NO: 76016 - DNA, 395 bp, Oryza sativa
  unsure (1)..(395): unsure at all n locations
agctntgcaattataaaacatgtgtaagcgctagcctggaagagacaggaaggctgcgctgttgacatgcggaccccacatgttaacctaaaggaccacggtagaccgagtacacagagacggtccacgggtcgacggaagcggatcccgtgtgttaaccgaggcgagtggccgacaaacggactccactagacaccacacgggttgcacacgtggaaaccacgcggctaccgagcgggcacactaacacggacactacacggtcaccacccgcgcgcgtgaacgactaccgacaccggtacacgggtaccggggtcgttaaccgcacaacgggcacgggcgacaccgaaaggacgagaacggcgcagcgagaggacggatccttaccaccacgc

SEQ ID NO: 76017 - DNA, 441 bp, Oryza sativa
agcttatctcgatcgagtcggctccaaactactcggacgagatcccatctacttcaacgccaccaaatcaagacgatggggcctacccgccaatcctgatgaaactccccgacgatctggctgccatcttcactacaaggacgtcttctccccgtaggtctaggtggaatccggcttcaacgccgatccagcctagctccagggaagtcggtgtcatactccagccactcggcacggtttcgacggatcaattggaaggctacttcagctcccctggcgtcgactcacgaccatcagagatcgtagagtatgacgaatccggctaccgctacgacaaccgcgacctcgacgacttctgacgaaagcttgaagatgactacacccctctctatttcggcgtcttcatggccgataacgagacggaggaacaacgccaagccc

SEQ ID NO: 76018 - DNA, 449 bp, Oryza sativa
  unsure (1)..(449): unsure at all n locations
agctttggcatagtgtgaaaaagagggggttgatcatccatacatcataccaaatggagcaggtatttccacttttcatattacactttgcaatacctctaaagacatccattagtttgcaaatatctctccaccagaatgagcccttcaagtttgtcaaatgaaggacagagttaccataataggcaaaccaaaccagattgacccagggcaaatccttcttattgtaaaacttgtccaaaaatttgatgagcagagcatgattttggatagtaaagtttagcactcctaaaccaccttttctcttaggcttacacactttatcctaggctgccaaagatgttntattggagttgacctcagagcctctccaaagacaatgtcttcttgctctgtcaatgttatcaatcactgtctttggcaacattaaagtacacatgtaataagta

SEQ ID NO: 76019 - DNA, 299 bp, Oryza sativa
  unsure (1)..(299): unsure at all n locations
gaccggatccttaagcactgggctgcagctgagatctncacctttctcgtctttgtacgttcggtgcacctgaccagtgacagcagattgcaatatgttcatgtccaaaattattgtttagaaatccttatcaaaatatattagtagtttatacttaacatggtggatgaaaatatacatttacatgttccattaaagcaaattcanaaaccaaaaaagatgaaaaatgatcactgttttgcatcatggtcattgtcaagcaaatatccttgtgagagacaccaatgtgggtgtgcaca

SEQ ID NO: 76020 - DNA, 437 bp, Oryza sativa
agcttaagttacctctgaagattaagatctttttgtggcacttgcataaatgggttgtctggggttgtctgaaccatggataatctggcaagaaggaattggaatggtagtttaatgtgttctttttgtatgaaaaatgagactattcatcacatttttttgaatggcattatccaaagtttctttggaggatggtacagctttcttttggtctataccctcctcatagcatatctcgtatgtttgaaaattggctactggcgttgacaaaatatccaggaaacttatacttatagtagcatctgctatatgttgggtcttatgcgtgagtagaaatggtgtagttcttaacaatccaccatctatgtgatatatatgcaggttcttttcaggccaactcattggcttcggtcctaggctcaattacataggtgtga

SEQ ID NO: 76021 - DNA, 432 bp, Oryza sativa
agcttgggagaggcaaaagagaagacaaagatggtgagaagacaagcaacaacaagccctacaacaacaggtcgaagagttcatcccaagggaagaagatggagaatctcacgaaggcttttcaacaagtttgtgctgctttcgagccactaagtgatgtaaatggtgaaagtggagatgatgataagaggaagaacatctccgatgtttgcttcatggcgcgtggtgaatctgacatagagtttgaagataatgaggtaagtgcgtttgaggaagctattaatattttgagtgaaaaaaataagaagtgtgagaagatatatagaaaacaggaatttatcattgaatctgttaaatctgaagttgctagattaaaatctcttattcgtaatgatgatgattgctcacatcgtgaggttttaatgaatgaga

SEQ ID NO: 76022 - DNA, 436 bp, Oryza sativa
  unsure (1)..(436): unsure at all n locations
agctngctctagatttcagtcctcttgtgtcggcgctctagcttatacaagttgaccacgacagaaggcataagggaagaacggntccatcttctcttgcaccctctcttcctcaatcacaaaattgtggttagagtgcagttctgtgtttgtttgttagggttaggcttgggcgatcccagttgtagtccctctgttggccagaggcggccggtcacgcttagcggtgactggttcggtgctagcctcctctgaggtccatatgttggagctgtcggtgcgtgagtggtggtctttttctctttttcctggntacgatcttgtaatattttttcctgctctgtcactatgaacttcgtattgtcttgtacgagtcgttaaaaaaaacagaaaaaagagttgagaactaccgccctaccacacagatgggtaacgt

SEQ ID NO: 76023 - DNA, 472 bp, Oryza sativa
  unsure (1)..(472): unsure at all n locations
atccttaagtcacctgcngcatgcaagctttccaatgatatataattcactattggatattaatatatttataaatattaaataattaatatcaagatgatgcataatagtcaacttaaaaatatgttaataaataaaattagtattgtacagtagagtagatgtaataatatttgtctctaacatgtcttgccactgtaacaaccacacaaactatatttatgtgatgtctcaaatgaatggatgtataggaaaatactagtacttatttaatattcgatggccatataattaaatccatggcttataggatatttaaatcaagtgtagccttatgattatgtaactaaaatataaacacacatagatgaatctttaacctgtttaggagaataataatagagctagatgtggaggaatcactaagtaaattaatcgatgcaataccatatagaatagcatatatatgcct

SEQ ID NO: 76024 - DNA, 294 bp, Oryza sativa
  unsure (1)..(294): unsure at all n locations
catacgagcttgactcgttgacgctcgactcattgacagccttagacaacatcgccttaccactcgcctgtatccatcatcttcactgcccctnttcactatctataaccnctcctcccattccaatccttgagcctcacatgttcccggccggccgccaagcatcgtcagacaagagaaaatcgactagggtgtgtttagttcacagctaaaatgaaagtttgattgaaattggaacgatgtgatggaaaagttagaagtttgtgtgtagaaaagtttcgatgtgatggaaaa

SEQ ID NO: 76025 - DNA, 461 bp, Oryza sativa
  unsure (1)..(461): unsure at all n locations
ttaagtcacctgaggcatgcaagcttgagaagaaggagaagcacaagcatagctagcatgatcgctatggccaagctcaccttgtgatgatcttcggctccgactccgagtcaagctcaagtgatgaagaaggagttgccacgttcgccgtcaagccttcatcaccaccgagattcttcaactactcaagtgatgaggacgctcccatttgcctcatggcaaaggagtctaaggtaccctctcccctcaactcatttaatgttgatcttgttagtgatgaggaggaagatgttgaggatgaggttatggatgacgagttgttcaaatccataaccaaggaatctataccacacttgagtgagttgcttgggagacttgaggaccaatatgcaactcttgagaggcaagaggctntgctcattcgtgagaaaaagcgatctcatgaactcaagagtgagctt

SEQ ID NO: 76026 - DNA, 124 bp, Oryza sativa
tggatcccccgcgagacaaggggctgctctcagccccccttctgcgcgaccagtcccgagggcgccccaagtgccagggggagcggttggtcctctcgccccccacttcgggccctctggtaga

SEQ ID NO: 76027 - DNA, 463 bp, Oryza sativa
agcttatccagactctcggtgtaaccaatcattttgatcacatgtatgctcactggaaaccttctgaagcctacaccaacaggacttaaagtttaaacctttcagctcttgcttggtcctcaaacatgttacgtagctcccgtgattatcgtatgagcatccaatgcctcatattgcctttgaaactcaggggacatagtagcaagcatgagacagcttatatcaagataatcattgcatcgcttttcatgctcgctacgttgtgcaacaggagcattgttgggcaagtcagctggaaaaggctgtgtaagcacaaactctttgtgctcttgtctgagaacaattcccaggttgcaataccaatccatgaagtttgttccagtcaactcctctttctcaagaatagaccgcaagttaatactggatagtgcacgagctgccatgatctacaatagaaatatat

SEQ ID NO: 76028 - DNA, 408 bp, Oryza sativa
  unsure (1)..(408): unsure at all n locations
actcagcttgtactttatttaatactcgtctaatacatttatcgtattgaaatactttccgagtatatgagtgctactttacattatgttcatgttatactgaatatacggctagcttatctggtagatgctttggtgcgggcataatgtttgcttatgcaattactctatgtcatgacgatgatattagagtagtatctggtagtttagacgttgtgtctagattacaggatatcgttatttggggttatatattgcgaatgagaggtgggctgctgatggtgacagctcagtacgggtattcctccgcgccggtatataatcctaagtcaatttcctggggtgggtattccttcgtantttgccccggntgtatggtcatgacgggctctcataaggaactcggaa

SEQ ID NO: 76029 - DNA, 412 bp, Oryza sativa
  unsure (1)..(412): unsure at all n locations
cgtttgattgttcgtcttatttgaaaaatttataagaaaattaaaataagttagtcacaaataaagtactatttatattttatcatctaataacaataaaaatattaatcgtaaaaaaaaatcaaataagacgaacgggcaaaagtgagacataaacagtgcaaaactgcacttattttgggacagaaggaatactgtattattatttttagggaaacggtataggtacggtcagaaatttttcatatttgtgaaattaactactagctagtactccctccgtcccataatagatgacgtttttgactntnntatttgcaacgttgaccattccgtttttgaaaaattagtgcanatataaaaaggataagtcatatgtaaagtatctttgataatatagaaaatgacaaat

SEQ ID NO: 76030 - DNA, 362 bp, Oryza sativa
  unsure (1)..(362): unsure at all n locations
ttcaagaaccaactcagacactntatagtttcccttctttttgtccattgctacactcatacgaacttgacaattagttntggtttcagctcgaggacactntgttagatgatcccttntgtcatttcctcgatgaccctcatttccacaaacaaacctatatgaaatgtacttcaccatctgatttctntgtgtaccttnttctaacctcaaagcctttntgacctccatatctatgccaaaacatcccagcctcatctgaacatttgaattccataccaacatggnggaccatacatggcagtagcctctctctatatagaanaacatcatcatcaagtatatgacttgtgtacacacat

SEQ ID NO: 76031 - DNA, 468 bp, Oryza sativa
agcttactctttgtagctccaatgccgatggatgagtcgaaaacacgcaagtcttttcatcggtggatcttctcacttagccgtgcaatcctttcctctttcacgtcagtgatcatgaatgcgcggtgacagttgtttccagtgtgagcagagtgccaagaaccgcaagaattggagggcaagaatgttctctgatctctctagctcagatgcactagttcctgatacctcccaaacctgttgcttcaaagaaatttgtgatagacaagatattgagataatctttgttcatcttttgtaatttctagaccacgttatgttatagctatctgtgttcaaatactattttgttcagtactataagaccatggcatatgtgaaggtacatatgaacctatgcatcgattgtcatgtgtgtaatatgtcctccttttttgagaggccatgtgtaatgtgtcagtagaactg

SEQ ID NO: 76032 - DNA, 452 bp, Oryza sativa
  unsure (1)..(452): unsure at all n locations
gctttcctagctttctgtaattcacggccaatattcttgatatttaccttactccaggaatgcagagatgccatgaccttacgtagagcagcactaatatcacccacgtcagatttagtccctgcttccacccaagattcctgcacaacttctggcaaagacggctcacgttcccaacatatttcataatgcaagattttcttcctggctggctgtttcatctcctgagacagttgcaaggatatgggacagtgatctgaacggngggaggccaggtgtgcaagagtcgcattatggaaggtatcacgccatgcattgtcagcaatggcacgatcaagtctcactctaacattgtttcttccctggcgcttattatcataagtaaagggtgtgcccctgaatcccaaatcaaaaagtgcacacgactgaagaagatcccagaaagctcacat

SEQ ID NO: 76033 - DNA, 427 bp, Oryza sativa
  unsure (1)..(427): unsure at all n locations
tggctataggacgagattggcatgtgcatttgtatgcaactgaatatggtaatatggtattagagtctgattctgagtatgaaccctatctacaattgaaacaaaacaaataaattggtgtccgacttctactcccataaaactactagttattagttactcctaatcatctgtttcgcttctcttatggtttacagcgggcatcatgccttagatttttgttttctacttaattcccttccatacaaattagcaatgattgtaccggaatctatattgtccatgcatgcatgatgcatatacatgttaggtcagtgtatatatttgagtgctacttccttagtgcgccattacgtttaaacatgtttggaacaaaatgtgctttctacttgcgggaagagtagataagcactcnctaatttagctg

SEQ ID NO: 76034 - DNA, 447 bp, Oryza sativa
  unsure (1)..(447): unsure at all n locations
tctatctccatttctttctgatataataaaataatgtcacggatatccagcaactgattatcacattnttattgtgtcctctagcagaaacacgttcttacagtgggatccagcaaagaacgtaaactntgggtatcttgtagcaaaattttcctttacagtaatactagcttcgattctagcaatattattattcttgtgatcaaaagcttatagttagaggagccttgcttactaagtggtggaatggtatggtattgagaaattgaagaatttttaaccataacatcatctcggagagggaggtagcctatntagttaaacaggacatagaccatcgtagatcagctnttaggccttctttaaattctggcagagctcctgccatcgtcttcctaaaagaaaaatattcttggtgtccannatagtatataaccncacaccatg

SEQ ID NO: 76035 - DNA, 438 bp, Oryza sativa
  unsure (1)..(438): unsure at all n locations
agcttatattataaaagaatntatgccaacattttatctttccaacacgtgtcttgcacgtgcacgattactagtatataatctaaccctaagtcaacaggtcaaactccaaatcctctacccatccagatctgcaccagccaccaaccaccacccgagtcagtccgccggctccgggagcccgggagccacgcgcgccgccgttcgccagtccaccgggagcccgggagccgcgcgcgccgccttttgccagccaccaccgacgccgttcaccagtctgccagccaccacgcgcgccgccactcactgccttctctcgccgggatactaaagctgtcatcgccggccgtcgccatggactgaagtcgccgtcgccggccgcctttcatcaatgcgccgccgggccggcgcggcgcctgcagccatctttaccgggag

SEQ ID NO: 76036 - DNA, 443 bp, Oryza sativa
  unsure (1)..(443): unsure at all n locations
caattcacaccgatttgctagtatgaaattcaacattnttcactgtgtactgcaggcttctgaagttctgaaaacaaagacgtaagagaaggcactagccaatactagatcgcagccaagatcagtaggttcggtgtaatctttttaagcttaaggcaaggcaattccacttttgttgcagctacgaccttatccctgttagtgcctgttttgtgcatcggaatgcagtgcanggcctgagtttcgttttctgtggccttcattcgcacaacttgttgtgtggtgaggtggtgttgatattatacatctacatggacgtacgcttgctaatctagcgaatagtgatgtggatgttcttgaccctagctatctctaactntcacgtcaaccttaaaaattcngtgtttggttttatcttcctttaatagcaaccttatgtttca

SEQ ID NO: 76037 - DNA, 436 bp, Oryza sativa
agcttgttggaacccgggagatacctatagtacgttccattcaagtagatcacacatcctgttttacctttagattgacctgaaactaaaaacattgctggataatcattgatggtcaccaagatgatggcctccactgtgaagtattctcttaagtactcgtcccacactttcaatccctctttccataaatcagccatatcttccaacaatggttccagaaatacgtcaatatcaataccaagctgacggggtccctgtatgaggatacagagtaataagcattttcacttttgacaaaggtaggtaggaagattatacatggtgagaagcactggccaagtactatgtgagctgctcatgtctccaaaaggattaactccatcagtatttagggcacacctaataatccgtgggtcttacaaactctctatct

SEQ ID NO: 76038 - DNA, 361 bp, Oryza sativa
  unsure (1)..(361): unsure at all n locations
acaactatgcgaattggtccttttgcccttcaagcgccatcaagagctcatccaggccgtccataccaaaacctggataagactgtcgctggggtggttcggccgaacccaggcctggcccaacaagcccaagccttggcttggtgctccttctctgcttcttctatccaattcttcgagtggaaagaccaattgaagtatttctaaagtaatcttagcccactctntgtatgaataggaattttcctccactttgagtctgtttttggtccaatttgatggtttattacctgcatcaaaatattcaccaacactcatggaatatgtcagaagtaaaccctatcactatgttggatgttta

SEQ ID NO: 76039 - DNA, 456 bp, Oryza sativa
  unsure (1)..(456): unsure at all n locations
ggctgcaagctttaatgcattctgtcatgctatcctcctcttcctttagttctgggcaaagggtttcacgacgaggatcatcacctacagataaggaataacttgagaatatgtactaagacagctaagatggaggattcatgtcaataacaaataatataaagcacctttactacaagcactgctaacatccttctgcatctttccaacacgccgcattgaggttttgcatttctccagatcagagtcttcatctgcttgttcactgagaacagtgtgcagtgcagatacaatcttctcagcggttcccccaacacctagtctctgaaaacaaaatgataagagtttaagagaattttcataacactctccaatgctgaagaacataatttagcagatggggtaggaaanaaanagcttacacagtttacagaacgagagtctcttttgacgatc

SEQ ID NO: 76040 - DNA, 394 bp, Oryza sativa
  unsure (1)..(394): unsure at all n locations
tcntgtgaccgttgttaatcaagatgacgaagttccatctggctgtgttacgcaaaccattgattntactccaaaattcaatggttcagatgtgactgaagttacttgtggtagtgttaagatgcttgtgaaggttacttggtctcttatggtctgatgacaaatgaggcgcagtacaccgtacttgtgaagcctgtggcgccttacttaatcatatattgntaataatgcaatgcaatatagtaaattttgtctaaacaaagttcattgttcttatacccttttgttttaattnttntgctgtcaactttgattgcaatattatgattgtgttaaaaaaacaatatcgtctgacattttttaaaaattaccttctgagctgttctgggtgatc

SEQ ID NO: 76041 - DNA, 442 bp, Oryza sativa
  unsure (1)..(442): unsure at all n locations
agcttgcagcctagtgtgcaaagcagatagtctcttgaagagaatccattgaatcccgggaattgctttcctcctagcctttcgtaccacgtggggtcacgtactaagcacgcccaaggcaagaagagtaagaatcagaagagaaaagcgccgatgcgaactgaagaagaagtacgtaagatgactattaccagcaccgaatggccttcagcagggataactattcctagacgtcaaagaggaaataccttccgaggtgcacggcagttgacccagcacctcctaagccatggtggcagagtatctgatagtgaagggtcagatcaagtctcctcggattatgaatatgagtccccccgacgtctcggcgaggaagagatggaattaanagcatgcacccgttgcggagaaattggacacattgctagcatgtgtctcacac

SEQ ID NO: 76042 - DNA, 479 bp, Oryza sativa
  unsure (1)..(479): unsure at all n locations
tcttcgcttataagtgcttgttggcanggagttgggttgcggaaaaagtttcttcaacagaaccaacaagtcattagaactactatcggaccaaccatttctggccttcaatctcataagctcaagcaccatccacaacaatgtgaaatccttctcacagccctttgcctcattgtacaatagatcattcaatggccttttcaatgcatcaaagttatccaacccacgggcggacccagcaacaatcttaggttcagcatgacgcaacatctcttccaaatctgcaaaattaccatcatctacgctgacattaccatcatcggcatcatcaactgtactgtgctgaccattgccaccaacaacatcatcatcatcaacaagttctactgcacttcttcttcttcttcttcttcttcttnctcttcttctttctcttcagctactacaaatgacatcctcgtccagctcaacacttcgtc

SEQ ID NO: 76043 - DNA, 451 bp, Oryza sativa
  unsure (1)..(451): unsure at all n locations
agctcgngtaggctctaaaatacacctnaattttctaccaccattgccaagccgcgccataaccatccatccaattgattaaggtataaaaggaacaaaaccctaatccccccctccgccaattcctagactcccagccgccgcaggagtgctcgacttgccttgcatgaccctcggctccacaccgttcttgtcgcggggcaccggctgccaacgcacttaccgaacacctaaacctcatgccaccaagcaccttagccccacgccatcggcgtgcagtaccctcggctcccaccttcgtcctcacaccccatctaaatgcccactggtttctaaccccatcaattgtcggatgaccgatgctaacctctcgcatggccatggtcatgcttccgggaacctgtgangctaagacatgttcccacgttatctcttcacgaccgaagctttc

SEQ ID NO: 76044 - DNA, 463 bp, Oryza sativa
tattcatgagaaatcccactccacaagataaaccaactataccagcaaataaatacacgtgatgtctgattgagtgtgatgtagacatagttggcaaccaaactaggagccggcaccgcacagcaccgcacctagaacgactcaaggggtcgaatacctatgggctacgattataaatagtcacttcctatggaaaaaactcttcacccaaaaaagttctcgtacaatcgctatagttgaatacaagagacccttgtgattcccaaaaatattctagatgggaaacgatggagaaaaggcatcaaaactatgcaaggaggcaggagggcctagcctagattcaagtaagtataaccctgatttattctcggaaatagatgatgaggaactctagcaaatttcaaaggtagttcctcgtagaatacatccactgattaaccacctaaattaaatcctgcagatc

SEQ ID NO: 76045 - DNA, 454 bp, Oryza sativa
  unsure (1)..(454): unsure at all n locations
agcttcgaggcctctcttctctgactgaaaatgtactttgatcagaactgagcacaaaattagtggaccattagctcaaagaagaagtggtggaacaaagtcagctgaaaggctaaaagaacaacacagcccctgacatttccctgaggcttgaggacttcttccctgggagtcatgtcaagttatataaggagtgcaaacatatgtatccattctattataccggagtctttaatggtccagattgctccttgtagaatcctatctactcgactcaaagtaagcattgttcattaattcagagatacttctagaggcgtaagacaaccatattttcaagtgtaaaatttaatatctcgtatctataagtattttaggtatcaagttgaatgacaataattatttgntgtcgctgatcaatcaatcctgtgataaataaacaattatgcatggc

SEQ ID NO: 76046 - DNA, 441 bp, Oryza sativa
  unsure (1)..(441): unsure at all n locations
ggagaagaagtcttaagtggagtcctggcttataccccagttgagcgcctgtgaagatggagccgtaagcccgctagtccgctgttgtttatttntgattgtcaggccttaagtgcctttgtaataatgtaaatattatcgatataataaagatgtgccttttgtatcatgtttgtgtggtgtaccctggcttttcctgngacggggattaatacactatcgttcgggaaaatgcaaaattttctcggtcgcgataggtattcaggtagcagatccaagcagctattgaaggaggcaaaatcaagtttgacgactctaagaggccgatgaatgttgatggcaatccttttcctgtaatatggtgcatacaactggccgaacagccgatggtggccgtgcaatgggttttcaggtcaattcgactaagattatcaattaata

SEQ ID NO: 76047 - DNA, 443 bp, Oryza sativa
  unsure (1)..(443): unsure at all n locations
agctntcanaatcctcagatgagaatntctccctaattggagcaatcataccctgaaaagctaaatcggctaactgggcatcagtcatacttaagctgtagcacttattcctcatctccctgaatctctgaatatactcatgcacaggctcatcatgtctctacttgatcgatgtcagatcggacaatttcatctcgtgaaccccactataaaaatagttgtgaaactatttttctagatcggcccaactgttaattgatccatatggtaaagaagaaaaccaaataaaggccgatccagacaaagataaccggaacaacctaaccctcagggcatccacagccgatgcttcaccacactgggcttaaaatcggctaatgtgctcgtaagtcgatgtactatcttcgtcctgaaattttgaaaattctggtgccttaaaccga

SEQ ID NO: 76048 - DNA, 414 bp, Oryza sativa
  unsure (1)..(414): unsure at all n locations
tgtgggttttagcgtatggggtatattaaggggtgtgatataaccatactagttctagagttcagtttagtgtaaaaaaaacaacctacttcacatcaataaaaatataaagcgtagtaaaaggtctattctattctaaatcccctgctactttcttaacccttcctatctctctcttacctcctacctaagagaatgaattcaaggaaatgaagttttgtgctcaaaagtgccagtggtttaaacaagtaaacagttaatatacctcaacctggtatntcagctaaggaatgtctggatctctaaataaaattcatccctgatgctgtgtggacaacacagtctgtcatccaagaaaagtaaaaagtcagaagctcaaggggataccattganaananatcaagagaattctt

SEQ ID NO: 76049 - DNA, 475 bp, Oryza sativa
  unsure (1)..(475): unsure at all n locations
tgcttcgcagaaagcaactgcaacagcatcttgcccactactgtaatatgtaaagcggattgttcagttaagggttattactcagtattgcatcgttggcatatagtgagggagactgggtgaggcaagattaccttccatggacaaaacccgtcgtgacgaagcctatcggccatctgaatgcctttcgtgtagaaatcgccgttggcagctggagattgctggtgctaggatccagccaagagaaataagaacttacatgggattgagggagctggagttcccatttttctagacattcttcttcctcctcttctgatctgttagatgtgtgaacagggatgagcttcttgaattgatatttcccagcactcatctcatacagaagaatgcagtgngatacaaaactaanatgattcaagccagaatcaacttaagaaatcagatgacaatcaatcggacagcaacattgatc

SEQ ID NO: 76050 - DNA, 469 bp, Oryza sativa
  unsure (1)..(469): unsure at all n locations
agctnttctggctccagccattttttcaagtgatccaataacttagcacctaaagtgacattaaaccagtttgatagtaattcaagcagacgagccaatccctggagcaacggcatggtaagactccttgtatgtgctaagttaactaagatgggccttaaactgctttgcagaagatcttttggcatcctttgctgctgaacgacctgtaaaatgcaaatcatcaatgagaacatgctagatgctgcaagcgcaatctagaatttgaatttttaaagcaaaacaaaataaattagaaaaggaagaaaataaatattctctgaaattccatgtcaatataagaaagcaattgcagtaaacaccacctgacgaagtccctccttggcaacattgacaatctctgtagtcctgcatgtcagagatctgaagaacattgagataatctttgcacgtaagtcgctatgatttg

SEQ ID NO: 76051 - DNA, 434 bp, Oryza sativa
  unsure (1)..(434): unsure at all n locations
ggcggtgagttcatgccgcggattccgcttgcctgcccaccaagtcgttgggcgttgntgagctgaagagatgggcgcggcctccattacgctcctttggcgccagagtgatggatgccgagctgcactcgggcgccggcgttggatcctggcttctcaccagtcatcagcgttgcatccgacctatgatggatagtatttacatgccccttgtccccaccgcttgccccatatttgtcgcaccccgattgttctgccaaccaaaccggtagtgcgaaagtggaagggcctaatagcaaatatgcggccacgctgaacagccatataggacgggcaacctggtctgttttggaccgaatgattcacttaacaangtcatnggacctaatggtgatttacaacatcatggatcgaagtgacaccaccttcaactt

SEQ ID NO: 76052 - DNA, 463 bp, Oryza sativa
agcttgacggcttttgggtaccacacaatggtgttgtttatgaggaccatatgaattcatcgtgtagatcatcaacctcgcccgtggagagagggtggagaggagagaacggagtggtagagaaggaagaataaaattagtcaccaacatgtagacccaatgtatatatttttttttattttttttcaatgactaggctaccacgtcaaaaaaaccaccctcaaaaacgatacccggttttacggttgagggatgcgatttgaccgagggcaagagcacaagggaggtgaaatagacatactccaagtgtaagattgcgcaagtatgtgaaggccatagcgggcctggatatggcacaaaaggtcaagctcaattactagcaaaagtgagtgtgtactctcctggttccttcacttatattcccagtttcagttctaacgcatgccacatttatcctcatggc

SEQ ID NO: 76053 - DNA, 484 bp, Oryza sativa
  unsure (1)..(484): unsure at all n locations
tgtgtacggacatgaggcagttntaccatgggataatatgatcggctcgagaaggacaaatttacaggatacgttgacagccgatgagtattataatctcatggccgatgagagggaggacttggttcagttaagattgagggctcttgcgaaagttaccaaggataaagaaagggttgctcggcattataacaagaaagtggtgcctaagtctttttctaaaggagagcttgtttggaagctaatcttgccgatcggaactcgtgataataaattcggcaagtggtcaccaaattgggaaggacagtttcacatccataaggttgtgtctaaaggagcctatatgttgcaaggacttgatggagaattntatggacgggcgctcaatggcaagtactntaagaaatattattcaagtgtttgngttaatgcatgaaatggctggtgttgacgaaaaatcgaacacaccggcttgggagatctg

SEQ ID NO: 76054 - DNA, 457 bp, Oryza sativa
  unsure (1)..(457): unsure at all n locations
agcttatanatttcctaccattatactaaatagcattatatccaatgtaatacggggtatactatgaaagatatggcctcagttctgctcagaaatatgcatcaattataatcatttgcatgaagggataaaaagaggaaatcagctactaggaggaaaaagcaacccatagaaaatagaacaagtgtagttcatctgttcttatccataaaatagaacaagtgtagttcatctgttcttatccataaagaaaagagcaagtgcaggaaattagagcagtagcaacagcatggccatataatagtagcaataagagcagtagcagggccatataacagcagtaggggtatatatgccacaggggcagcaacagcagggggagattcacataaacagcaacagcagggtggaaattacataaacagcaacagcagagggaaattcatcatagacagca

SEQ ID NO: 76055 - DNA, 467 bp, Oryza sativa
  unsure (1)..(467): unsure at all n locations
ttgccgtgacgtgtctcatgtgttaagacaaggctcatgtgttgggcagtcacggagtgtgggtaaagtgtacatccactgcagtgtgagtaaaccaaatctattcgaatagccgtgctcgcggttattgagcaccgggacatgtattactcttggctagtctctaaattcttaacttatgtgggatgggttattgcatgatgaatttttatgctgttggagccacttcctgagatgggggaaggtgggcatcctcagaaaaccataacgactcaacggcggaaagctatccttgggatcacaatggatggtggacagaaccgtcgttggtttaatacaaacactggtactaaagtttgatcagtcaatgctaggtcttaggcttgtgaaaagaattacaaaatttgctttgcgcanaanaaaccatagccatcccttgaaataccctatcatatgcattggtgatg

SEQ ID NO: 76056 - DNA, 461 bp, Oryza sativa
  unsure (1)..(461): unsure at all n locations
agcttacctctggggacacgctgtgtgttccatacttatcatcccagtacatagtactgatcctgtataactgttgtatactaagtacctgagcagaaagatatagggttgtgaattaattccatggacatccaactttccaaatgaagggataaatgaatcgcttggttatatctcacttactggacaaaggtcatgacttatttcatccaacgttntctttggcttttgatgaatcacctgacataaatgatagatgtgagagaccagtacaattgatttggcaatgtccaatactgcaatctactttatatctatactatacttctttatataagttctcatatcccaaatgttaaatatgtaactgtatatcctcaaattcaaaatcctaatttataaaggacaaagataggatgtttgaaaccatttatcatagtcttgatttgatcatacacata

SEQ ID NO: 76057 - DNA, 449 bp, Oryza sativa
  unsure (1)..(449): unsure at all n locations
actaagcttgcccgaggcacgccgaacacgcacttgtcggtgttcagctntatgcgggcggagcggagactttcgaaagtttccgctagatccgagagtaaggtctcttggttgcgcgttttcacaaccaagtcatcaacataggcctcaacattacgtcctatttggctacccaaagaaattcgagtagtacgttgaaaagtaggacctgcattctttaacccgaaaggcattggcgtataacaataagttcctatgggggtaatgaatgcagttttttcctcatcctccctagccatgcgaatctgatgataaccagagtatgcatctagaaaacacaaaaggtcgcaccctgcggtggagtcgacaatctgatctatgcgtggcagggggtaagggtncttatgacatagccttgtaaggtcggtgtagtcgatgcacatccgaag

SEQ ID NO: 76058 - DNA, 425 bp, Oryza sativa
  unsure (1)..(425): unsure at all n locations
gctctttaagatgttaactnttggtaaatattaacggaacctttattgatcattgttggagatagatcgtagccagtagcccaccctttggctgtgttctttccccaattttcccaacccacctgtctcgttttccgcgcgcacgcttttcagttgcttaaaaaatcatattaatctactttttaaaaattaggtaatacaacattaatcatgtaataaaacgagcttcngtttgcgtgccggacggaggggttgccaaccactccttccaaacgcagcctttatattgggacgaatcatgaacagagtggatggcaaaacaagaaaatactagtgatgccaagatggcaaagcacgccgaaggcgatgggaccactcctatctaacacttgtccaaaaggcttaaaagtacagtttgtccgagt

SEQ ID NO: 76059 - DNA, 463 bp, Oryza sativa
  unsure (1)..(463): unsure at all n locations
tgctgcagtccgaggcgtcgcgagcgtcagtttaattgttttcatctcgagcggtgattgcttcgcaatatcgcatgcgtcagtcgaggcgtcgcgattcaccgactccaactcatgagcgttcaacgtttggatggccgtggagaggcggactgagcgaccgatgctgcggagacgcgaggcagcgcaggcgcatgcaggcagcaatcgccaatcgagcgggcgagcgggagcggtggcgtggcgcgctcacgggcggcaaccagcgagggggagggcgcgccggcgaggccacaagtggccaatgcaagggctcgagcgtgaccggcaaccacgccagacgagtgccgagcaagtggctggatcattgatttatgcatctncgcacttgactctgtctctgaatggttgaacgtcaagtaattngacgaactactctntcatctcatctctgaatcttttc

SEQ ID NO: 76060 - DNA, 454 bp, Oryza sativa
  unsure (1)..(454): unsure at all n locations
agctngtctgctcatccaacggcaatctggttgctctcgatccggcagcccttcatcgatcctggcaggctagtgagtaggcatactacatgctcatctacgtgtgtgtgtcagaatctggatgagcggaggccgatgccagctgctgcttcaggtccggcggcccgtgggcggaggagcangaggtggaggtggtcggacttggcgttgttaccgccggcggcgagctgcacggagaagagggagttgacggggcggtggtcggagaaccgcgactccccgcgcgcgtaccgcacctgctccatccccgaaccgcgccacaggatgcggtcacacctgcatttttagggtcagttaagccaaattcttcgtgttacttctagactcatagtactaanaaatattatattntataccatacattctaatactaattaggagtatagcaaatatt

SEQ ID NO: 76061 - DNA, 353 bp, Oryza sativa
cgctgaaacagagctactcaaaagtacaggcaaatcaaacgaatcaaagcatacgccatactcgctcgccgacattagcacgtactactcatagtaagcttacggcaacaacacgcagcacagtgggaaggtaaaactcaaatgaaaaatggtgtgcttacagaggtctcttccatggaggaaaccaccggatcctgcaacgccgtcgcgcccttcgactccggtgaggtggttgccgtccgtgccgctgaatcgatcaccaagggcaatggcgaaaccagtttgctcagtcgaacagaaaaaaaaaaaaaaccggaagcgagcacgcacgaatcggtcaacaactcctcacc

SEQ ID NO: 76062 - DNA, 464 bp, Oryza sativa
  unsure (1)..(464): unsure at all n locations
agcnttttntggtatatacgagttttaggatttcaattctatagaaaaaaaacacacgagtgaattctacaaattttccttcgaaattcctatagaataaaaaaaatcctatagagattttggaggaaattagcaagagcttcaatctcttaaaaaatctcctcccaatttatctatttcatatgattctcgtgttttcttaatgtgttttcgcattgcattcatgatgaaatactatgcttttcctaatgctctatttttttaatcccgtgctttaaaagaacctttagaaacaatgtttaaaccattaaatttaattagattcaaattacatgaaatctaaatttacttatagtatgccacttcaaaatttgcaagaagtctataaatcctatcttactatagagttataacccactaactgctaaaccttaacatacaaagatgtcacgtcatcatccact

SEQ ID NO: 76063 - DNA, 284 bp, Oryza sativa
  unsure (1)..(284): unsure at all n locations
tacctaccactccaatcattcattatcattaggccaaagatatgttcttcagcatcattaatatcgataggttntcccaattcattccctggtccaacaatggctgcctgaaagcaacaagccaacaaagcgttatgatatatttgatccangggaaatgaanatatctataactaattacatacggccagattgtataccacaatgacaaccaacagctcaaatntaacaaacatgcaacaggtatgtcaataacagttcaagaataccaaatactgtgagtc

SEQ ID NO: 76064 - DNA, 467 bp, Oryza sativa
  unsure (1)..(467): unsure at all n locations
agcttagtgtctctggtgctgttattcactctttactctatgcagacgacctaatcattacaggtacagcaactgttgaggaggccaatcaaataaaaagcatcattgacaaattttgcaggaaatcaggacaaactcctaattgggataaatctgggatccttttcagtaagcatattccctctcatataaagaactatatcagtcaaatatttcctgttcctatcctggattctaatgtcagacatctaggtcaccctctttntgtcactaatagaaacaagtccatcatctataaattcatcattgataaattcagggccaagttgactactcttaaagcgaacaaactttcccatgctggcaggctaactcttatcaaatctgtggtttcttctctccctgtctactacatggctaccatcctcctttcaaaaaatctcctcaataaaatcactgctattatc

SEQ ID NO: 76065 - DNA, 278 bp, Oryza sativa
  unsure (1)..(278): unsure at all n locations
gacaaaacgctatctgttcttaagcatggtgataatcaactgttcgttcagatntatgtggatgatatcatctctggttgttcaactcacgctgtatttgtggagtttactgagactatgcacagtggaattgagatgagcatgatgggtgagttatcgtactttatggtattgaaattaagcaaacacctcaaggtacatttcntgatcaaacgaagtacacgaatgatctcttaagacgggtcacgatggagaattgaagccaatttaacaccaat

SEQ ID NO: 76066 - DNA, 404 bp, Oryza sativa
  unsure (1)..(404): unsure at all n locations
tctaagctgggaccttggttaatgtcggaacaaattatatgttgttcatttagacggcttgtttgactagttgtntatgtgggttctgtagtttcttgaaatttgatcatatgttcgcattcaaagtacttgatttgtcttttttgtgggctcagatgaagtaanaggtgatagactggagaaaaggtatntatctgacaacggaggattgaaattaaatgcatgtatctgtaagtctgtcaatgcttantaaatnttgtttataaaagacttattacatgcttctacaggtttcgaggttgctcatcactcacatggttgacttcgtaaactggangnacacgctgagtttacaatgatgtataaacttgatatctatattcatatggcattgaaaaaaatat

SEQ ID NO: 76067 - DNA, 490 bp, Oryza sativa
ttacagtcacctgaggcatgcaagcttcttcaggctagctatctgattcgaccaattgacatatttatgctaaatgctgccagccgtcaatatgaggatgtcgatcctgattttattcgattttgcttctttcaagatatggtgttcaagtgtcctccattgcaagcactattgcggtacaagatagttatatcaacctacatgagttcatcgatgctgcagtctgaaggcattcgtcgggggcatttcacacacatttttttggatgaggctggtcaagcctctgaaccagaggctatggttcctttgtcgggtttgtgtggaagagacactgtggttgtgttagcaggtgatcccatgcaattagggccagtggtttattgtaaacaagcagagaaggatggtttggggaaatcgtatctgcaaaggctgctctttgaatacgagcagtacagcacaggggatcctaactatgtgacaaagctagtga

SEQ ID NO: 76068 - DNA, 450 bp, Oryza sativa
gtgtctgaagtttgcactaagaaataactctagaagaaaatcaccaggagatgttccaaaggcatgaactgatgctgagatgtgcatgtcatgttttgcttacaaaatattaacaaatagggatttgcgaaagagatggtaatcatcttaattgatgataatgcttgcatataaggttttcttttttgtaaacatgtgatgtttgacatgagtgaaaaggtttcgacctgtagtaagtgtgataacagtgcaaacccgttatacttagaaccatgaaaccatgactgtttgatatgaaatcatggttaatcgtgtactgaagtgtacattaacgaaaggtcattggcattaacaccaatccctcttttcttgtgccttaactgacaacccagttccttgtcctcgctttgttattcaaacttctttattcgtactctaagctagtctgat

SEQ ID NO: 76069 - DNA, 464 bp, Oryza sativa
  unsure (1)..(464): unsure at all n locations
agcttccccgatctgttttcttctggtttggttctcttacagcattcaaatcattcatatactggaccacagcctggcatgtagaagaaaacattattaatcatttaaagaaagcgaaggactaagtaagcaaatatggcagaacgatgagtgacaatgttagattattgttctaataagtgagatgtttgttataatgcttgtacgtagctaatgcgaagagtgagaaaaatttaacattatcacttattaggagtaataatatatgaaataatttaccagcatattatctaatatctcacttattaggaaataattatttcaaatctcacttactttaacaatgattgttacttcttaagccacaaaatctatgcgaaatcaggtaactctttcgagatccatgacaagaataacaaaanaaagtagcagatacagtacagtcacaaagaggcaccaacagc

SEQ ID NO: 76070 - DNA, 368 bp, Oryza sativa
agtatattatattctcaattctcatcctatgttactaatgagaacattttatttggcttgaatcttcaagtgactttggctggtggggtaaatccacaaaaaatggttaatgtaatattaaaattaaaaaaacattagttttttggcaaacagctgtgtgaaaattcaactatttatagaagttgatacaagatgacatatgagtacccactgaagaaattgattatgcacaggaatggaccatgcccccaacacccaaggacacacacacaaaaagaagtcctgcaactgtctgacctcatggtgtatatgaactaatgaatagttattattccggattgcagaaatccaccattgtaatgcccatg

SEQ ID NO: 76071 - DNA, 335 bp, Oryza sativa
  unsure (1)..(335): unsure at all n locations
tccagatggcacagccacaagccacaatcaatcatcgcagtatcacaggcacggggagaggcgggaaggggtttaccggtgatgaagagcaagccggacttgagctgcttgaggaacacgacgcgctttcccatgtacctcccggcgagcaggatcagcaccgtccccggcgtgatggtcgacctgcatcacgcaaacaaacaaacaaacagataaaaatcactcaggaacaccgatccatagatcacgagcagccgatagttggtcgcatggctgagacctgagcttggtanggttggccttgcgggtgctgggggcgcggngcttgacgtcgt

SEQ ID NO: 76072 - DNA, 446 bp, Oryza sativa
  unsure (1)..(446): unsure at all n locations
agcttggcgggtcgggtatgcttntcctctattcttggttctcctcttcttttttacatgtcccataattaacatttgctctcttcgccgttcctattttgcatccagattcttgcagctcactgttcgacagagcgaaccatgcgggctcgtcttgacagatttaagaaccgtcttcgggccaaggatgacgaaataggccgcaagaacttggagatggaggccctcgccaacaccctgaaagaggcgaaagccgaaaacaagcggctccaatccgagttggagaaaggaagagaggttatggccgaggtcgatcgcctcaaggccgaactggagaaagggagagaagccatagctgaggttgatcgcctccaggccgaattaaggaaagaaaaggctcattccgccgtgctgatggatcgttataaccttactgagccgaagat

SEQ ID NO: 76073 - DNA, 443 bp, Oryza sativa
  unsure (1)..(443): unsure at all n locations
tgtaccataaatagtatattntattcccttttataagaagcatatgtcatttggttttcttcgattcgtagcactcccatcacatttgccgtatgtgcccttctacaattccatctttctgttgggctaaattccctccacatggacctttgttcttagcccatttgcagtccaaaaagtctaacaattgtgagccattgattcatgtcttgatcaatggttgagattacctcatcctttagtggtgggaagaaaaaccctagcctttattggagggagagtgagaagtagctntgaggtgaaataacaacctagcaaacacaagagagggagaggagagtagagaagaagaagggcagcttgttcagcttaagggctcttacctgatcttcatcaagtcagcgactggaggatcaaacatggntgggatggcactaaacttg

SEQ ID NO: 76074 - DNA, 356 bp, Oryza sativa
acagttgcggcaagcgtcgtctcttgccggcttgtggttgccggcggcgccgccctgagcgcctctgcgagcaccaccctcggcgcgtcttcgcgcccaccgcagttggacgcctccgcgcgccttgcacggcttgcggccgcctgtcgagggagaggactcccccttcctcccgtaacctggctggcctccactgctccgagtgagatggagcttcccgcaatggtgaaggccccgagagaggctgtgctcatcgccgccacgaccttgaggcgacctaacgcctcctcgatcgacatcgtggagaggtccagcagagactcgatcgagcgagcgatctgcctgtacttctctgg

SEQ ID NO: 76075 - DNA, 373 bp, Oryza sativa
gcgtagaaacgacgaagatgttcaatgttccaagagttgtcgacaagtgtaccgtcttcgcgcttgagtcgataggaacctggtcgggtgacttcagagatgataaatggcccttcccatagaggagataacttgtgccgatcttgtgtagtttgaattttcctcaaaaccaggtcgccgactagaaaggcacgggatcgaacattgcgattatgataacgtcgcagcccttgtaagtatcgagccgactgaatcaaagccgtttcgcggacttcttccaatcggtgcaagtcatccactcggtcctcttcgtagcgttcttcacggaaatttcgaaagcgcaaagactcgaattcaacttcactcggcaaca

SEQ ID NO: 76076 - DNA, 431 bp, Oryza sativa
  unsure (1)..(431): unsure at all n locations
agcttaaatttctttgaaatttgagttgggattttcacatttttttgttgaaattagtatgaacatgaactgggaatttcaaaatttgagttggaggttacaaaattttgtcgatcattnttttaaaattgagatgaaagttttaaaaatcaagttaaagtttaaaaaataaaatataatttgagaacaaagttntgaatttttgaattgaaagttgactccattttttacatgagtgcgtttatagggatgagtgtgcgtgtgttgtgtgtctacgttatatagtaattctttaaaaaaaaatacatcgacactttctgttgaaaaaaaaaacgccgcgagcgaagcgaacgaacagcggcgacccgggaggccgggaccgggagaaggaacagcgagccgatcatcgaagggacagatggcgtgggcct

SEQ ID NO: 76077 - DNA, 451 bp, Oryza sativa
gtgtctgaagtttgcactatgaaataactctagaagaaaatcaccaggagatgttccaaaggcatgaactgatgctgagatgtgcatgtcatgttttgcttacaaaatattaacaaatagggatttgcgaaagagatggtaatcatcttaattgatgataatgcttgcatataaggttttcttttttgtaaacatgtgatgtttgacatgagtgaaaaggtttcgacctgtagtaagtgtgataacagtgcaaacccgttatacttataaccatgaaaccatgactgtttgatatgaaatcatggttaatcgtgtactgaagtgtacattaacgaaaggtcattggcattaacaccaatccctcttttcttgtgccttaactgacaacccagttccttgtcctcgctcttgtattcaaacttctttattcgtactctaagctagtctgatt

SEQ ID NO: 76078 - DNA, 415 bp, Oryza sativa
  unsure (1)..(415): unsure at all n locations
gcttcatcaccttccttgctcacacgttcttgctgctgtcggtgantgtggcatatcttccaatgtgtacgtctcanattatttcaggaaagaagcaatctttcatacatggagtgaggagatatatgggttcgggatctcaggatcttacacaacgctgagtggcccaagtttttacattccagacccatctaagttaagggtgaaaaagggtcgacgccaaactagacgcatcagaaatgatatggatgagtcagaagcaggtgggaggactttacgctgcagcaagtgtgatctgcgcggccatacttacaagaaatgcccgaagaatgcagaagttccaagcggcgcagatgctaatccatctggacaggcaagtgatggtaggcgaccaccttgtgaaggaacaacaagc

SEQ ID NO: 76079 - DNA, 394 bp, Oryza sativa
  unsure (1)..(394): unsure at all n locations
ctcatggacttgagagatcttgtgcacactggaatcggaactctcaagcctttggcatggaaaaggacgggttgttgagctacgtcgaattgctagtatactcgattagccaaaagtatgcagagcccatacatgcggacagagattccaatctgaagttctgaattgcgtcgcaattctcaactgttacagccatataaatttatgtttagtattagaattctggagcagcactctacccttaaaagaaaaactagagcaactggtactttagaccctatttgcagctcattcaaaatttcttagacctaagtattcctaattaacttcacagatccatantatctagatatatgaattgttaataacatttgaataaatcatcttntattat

SEQ ID NO: 76080 - DNA, 470 bp, Oryza sativa
agcttgtcctaatgctggcatgtgagcttcccttgttctttctgcctcaggtgaatcagtggggcgttcacacacatcagtacatcaccactacatcagtcactctcttacatactaccctacatcccttgctagctagctgctcttcttgcagtgcaggacacaagagatcaattactgccttaatttgaatttgatatatatgcttcctggatttggtagtgttatatatattttctctggcccaagtagttgcaatgtagtgtaggcttggaatgcaatactttgctatgcgtatgtatgagctgaaaataaatactaccaatgcacatgttccatctttattactttaaatgtatgtttactaattaaaaagtattgaaaatatataactagatgaaagtatttttcatggaaaatctagtaatattattttcccatactaaatccaaatagtcttatatatagcg

SEQ ID NO: 76081 - DNA, 389 bp, Oryza sativa
tgcctccacttaagccttcaaaccggtagtcttaaccacatccacatctgaatcaatagcacacaaccactcatgttggatgatggtgcctgacgacaacaggcctcacagagctgtctatatgtccacgccaacactgttgacccccaactgaaacggcccagatcaccaaggttggcgaccaaaggaatccatatcgccgaagcaatgtcacccccagcatcaggaaacagaacccctcccaacaagtgcaagatgtatgcacgggcataacactcaacacgccatggctcagcatcgtcgtcaagatgtgagaagttctgactcagccaagacaggggtattccattctgcttcttcttcccccttgcccctgctcaatagtcagt

SEQ ID NO: 76082 - DNA, 449 bp, Oryza sativa
  unsure (1)..(449): unsure at all n locations
agcttctcgctgtgatgaccgagtgcctgntctttctcttcctcctcaacatcataaaacacctctgcagtctctgtgacataaccttgttgttgcatccttgcgctaatctcagccagctntgcatgaatgtcattatatgatgggtgtgacttgtcacctgagacgaactcatggatggagtcatttatctcaattgagctgcagccaggaatcttctcaatccccttgcttctcatggtcctccggacatcttcaacaccactccatctcccaactgcagcatagagatttgacaggaggacatgatcaccactacaagttgcttccatctcagatattgcagtttcagccatcttgacatccttgtggagacggcatccaccgagcaatgccctccaaacgacagcatcgggtttcatcggcattcctgcaatgattttgtgggc

SEQ ID NO: 76083 - DNA, 456 bp, Oryza sativa
  unsure (1)..(456): unsure at all n locations
agctntctctttcttccanaaggcacatcctattgtattaagttgaaaagggaggatatgttgccatagtttggtagtaagcccggtaaccatagtaaaccgtgtggttgccacggtgaatagtgagataaatagatatgatttatcaaaaattcaaacttttacttaattgtttttaaaactttaaaacaataggtccagttgatggtaagaaaaacactgatcctaataagatccacaagtaaacacaaaattttggaaatttaagaaccaaattaaccctaaaaattctcaattcttatagaagttttcaaaaactatttaggccatatgtttcatattttaaaatgttttaagtttatcctaagtcaaaattctttaggtttgatcagntctaaanaatagcaatatctataatattaaattacgtttgggtaagtcattattacatatatc

SEQ ID NO: 76084 - DNA, 439 bp, Oryza sativa
  unsure (1)..(439): unsure at all n locations
cagcttcttttttgtgatttgacaacttttgtggtgttcagagttatgtcctgctatttactccccttcatctcgatctgtttggcgtcgcataatcccaaatgataatgttgtacgccaacaatgccatacacagctacagcagcagaatctgtcctcggcttctcaccaaagtgctgatagtggctaattgatttcttttcagttntctgtgatccactccgatgacatcaaatngtttcctcaattcttgtgggtatctttttcttgctaccagatcctangcaaccatttgctggtcgcaccaatgtaagtttattattntgccaatcttatgtngcatatcccatcaatttttatcacatcangacatagatatatgtgtgtttcatatgctagggattatctctcatttgctcaactacagtagcttactcac

SEQ ID NO: 76085 - DNA, 462 bp, Oryza sativa
  unsure (1)..(462): unsure at all n locations
ctgatggtacaatcgaaaagtacaatgtaaggcttgtggccaagggttatacccaaaaggaaggcgaggacttcttcgacacatactcaccagttgctcgcttgaccacgattcgagtactacttgctctggcaacctctcatggtcttctcgtccatcagatggacgttaagacagctttcctaaacggagagctggaggaggagatctatatggatcaaccagacgggtatgtactagaaggtcaggaggtaatggtgtgtaaactattgaaatccttatatggcctcaagcaagcacctaagcaatggcatgagaagtttgacaccacgcttacatctgcaggctttgttgtgaacgaagctgacaaatgtgtatactatcgctatggtggnggagaaggggtgatcttgtgcttatatgtcgatgacatactgatctttgngaccagccttaatgtga

SEQ ID NO: 76086 - DNA, 416 bp, Oryza sativa
  unsure (1)..(416): unsure at all n locations
ttcacttgaatcgatgtactaaaacatgaattcatcaattcaccgaagcagttgtactgagctgctgcatagccgagactgctacacagccaccaccgatgaacgagccagcgccagtagccggctagatggacgaggagctgatgatggcgacgaacggcagtggtggtgtggcggcggcagggcccaagcctcctggaaaggggtccgccgctggctatgaacagagacaacaaaggaatctggctcggtgttgtcatgtacccaaatggtcggatacacgatgggccatatagtgggctgcagctaatagtgggcttagcccaagttacctaacaagggtgcangtcaatgagcaggagtagaaatacttcccttcagcccacataacagggcatcgaaaaattgaacaaaca

SEQ ID NO: 76087 - DNA, 194 bp, Oryza sativa
attgtgacggttttctctgccagacttcacacgtcactaaaggtgagatctgccacatgcatagacttgacctgaaccactcgattaccttaaggtagactgccactgatatatcttatgtagtggaacttctgtacccataatagtgggaatttcaacccatcaagactatacatcattaaaggctctaatat

SEQ ID NO: 76088 - DNA, 405 bp, Oryza sativa
  unsure (1)..(405): unsure at all n locations
acaacacggtaaagtgacagaggtcgaaaatgaccattcataatacaaaaatattntgaccatccaaaataaagaatatttatacaattaacgaatggatgaaactccatgcaacgaagatacacgaagaattggttatgtgatcattgacatgtgggtttacatgtaagtgaccacgtccctctaacttcaccttataagattntaatccatatatggcatatatgtattaaaaaatgcaagggtgtggtcatgaaaggggattctcatggttattattgacatatgttacaagtatataagtatccacacatttaaaatgtatttgatgggaattgctctatatatacatgccactagtcaaaccctctaattccaaattataccgttcatattcatcttatt

SEQ ID NO: 76089 - DNA, 382 bp, Oryza sativa
  unsure (1)..(382): unsure at all n locations
accaccacatttgcagcgatgagcgcgtatattcctctgctgctcctagatatttgttcaccacctgtgctaatagaccccgctcgtttctattaggaggtgttttaaggctgttcactttcatgccattttcaaccttaccaaatcttattaaaattgtcaaaaaagtggctacatttagtttgctgccaaattttggtaactatataagaaatcatgccaaaagttaccaaaattntagcaactatgacattagatcggcgtgtcacatcgggtattatatatggtgtcgtatggggtgtttgcgtactgataaaaaaactaattacagtatccgttagtaaaccgaaagaataaattattaagcctaattaatccgtca

SEQ ID NO: 76090 - DNA, 464 bp, Oryza sativa
  unsure (1)..(464): unsure at all n locations
agcttggttgataatttgaaatttgcctttcaatcatgtttctagtaacagctatataatccaaattttatcctttaaagttggtgccttcataaatactacctccatcccaaaatataagaatttatagggttggacacggatatcaaggaagtaggtggaattaaatgtgaaaaggttgtgattggttgagaggagaaagtatgtggagaatttgaatgctggaagatcgtgattggtggaaaagagaatgtatgtggagaagtcgttatattttgggacaaattttgaatgctagaagttgatgtattttgggatggagggagtaacctttttattggtataaatggcaatataccaaaggcttaaatttcaaatttctatttatgaaatttgagttggttgatctttgtgccanaagaaaaataacaaataagttcatttattgggggttgtagtggatc

SEQ ID NO: 76091 - DNA, 434 bp, Oryza sativa
  unsure (1)..(434): unsure at all n locations
agcttgccgttcgccttgggaacgaccaccgtgttcgccagccactccgggtggatgacttcacggatgaatccggcctccagaagcctcgccacctcctcgcggatgaaggcttgacgttccggggcctgccgccgcactttctgccggaccggccttgcgcccggccgcacggcgagacggtgctcaatcacctccctggggaccccgggcatgtccgctggtctccatgcgaagacatcagcgtttgcccgcaggaaggagacgagcgcgtcttcctatttgccatccagaagaccaccgatccgtgtggtcttggatgggccgtcgcccaaggcaacctccttgaccgggacctcgtcgcatgtggccatccgctgcctcggggcggtggnggcagaggggccaagcctctcgtcaccaccctcgggctt

SEQ ID NO: 76092 - DNA, 366 bp, Oryza sativa
taattcaatgctcgccgccgctcttctaacctcatcaaaacttgtaagattcttcattccgtactgtggtatgctcactttatgatggttatctttgaaggacaacatatgtttatttttatgagtaaaacaccaattttttatctactgatatttctagccaaaaaaaaattcctgttttatctacttattccattcacattgcaaggtgtaagtgatgatggaaaaagagtaaagaggctgcagtcatttactgtatctgatatgcaggacctgcaggtattcatgaatctcaatcgcatgctcgttatcttatttttttgtaaatttgtgataatctacactgatttatatggcttcttcatc

SEQ ID NO: 76093 - DNA, 442 bp, Oryza sativa
  unsure (1)..(442): unsure at all n locations
agctntagttatgctgccacacantttgataatataagaattgaaagttagaagaacaatctttgtgaaatggagggagtagtttgtgtccatcgaagaanaaagggttggacaagccataggtttagtgaccaacaaaggtgagatcattaatctttcatctaggagggaaccatctgaggatgttactagcgcctagatgatacattnaaactagaacacagtgttggttcaagttgttttgttacttcaaattaaaccaccatccatctatacaattcgactaggagaacatgcgacctatgtattttttaaaaactaaactactatgacagttttgactgggtcataaaanaaatttcatgtgaaaatatgtacgatgatcgagatgacatggacatcaatccttcgtacccaattngactttgtatggccctcctat

SEQ ID NO: 76094 - DNA, 458 bp, Oryza sativa
  unsure (1)..(458): unsure at all n locations
tgcctncatctcctnccacttcggcattggtaacagtgataattggtaatcggcaaagacgtcgtcggcttagaatcattatcggctgcagtatctcggaatcagccgatgggagttatcaagtcgccaatagtcggattcctgctatattcagttaaggaaatcaatctattaaaggaagcttatccctaagtgaccgagtttaaagaggatgcggcatggcattttatctattaattaggaatagtttgttagtttccttttatttttaggaaagtgtgtttagtgtccgataaggactttatattnttccttttatctttaggttagtttctttcttgtccaacaaggacttgtatcaacccatgggtataaatatgtacacccggngtctatgtaatctatcctcacgatcaatacaattcgacgcatcgccaccttttaccttttctacttta

SEQ ID NO: 76095 - DNA, 437 bp, Oryza sativa
  unsure (1)..(437): unsure at all n locations
agcttaccggaaagcagctgtgccagatggttgtcgagcgcgccgacattntcggaaatcgacatttcattgtcgttgagaatcaccagcatatcaggacggatatcgcccgcgtgattcatcgcttcaaacgccatgcctgcggtaatcgcgccatcgccaatgacacagacggtgcggcgaattttgccttctttntcggcagcaaccgcaataccaattccggcactgatggaggttgatgaatgcccgacgcttaatacgtcatattcgctttcgccgcgccacgggaacgggtgcagaccgcctttctgacggatggtgccgattntgtcgcggcgtccggtcaaaattntatgcggataagcctgatgcccacatccanatcaattggcaaacgggtgttgagacatagtgcagcgccacgtcagtcgacc

SEQ ID NO: 76096 - DNA, 438 bp, Oryza sativa
agcttctcagtcatggaaaactgcgcattttatggtaatgaccgttcgatgtcatcgacacctcttcacatggtgcaatcacactccacgacgaatcacgtaacatatctaaggtaaacggtcaacgtttaaagattcttcttgagccaaataaaactttatatgaaccatgatgatctcatctattgcatgcttaaaaccctgtatagatgtcatttttgtgcttagtttacgacttcgtgggcctaggaaaaatctggtggcctgccggacccaccaaggttcggccgaaccatcacggtgcccgatcggcaccaattatgaatggcagtctcccccgctcgtcctgagtccgcatagacgtgcgtttgtaggtagaacgttcggatcacagcataacacttcttctttattcttttacttacctatgcacactct

SEQ ID NO: 76097 - DNA, 370 bp, Oryza sativa
  unsure (1)..(370): unsure at all n locations
acaccacatttgcagcgatgagcgcgtatattcctctgctgctcctagatatttgttcaccacctgtgctaatagaccccgttcgtttctattaggaggtgttttagggctgttcactttcatgccattttcaaccttaccaaattntagtaaaaatgtcaaaaaagtggctacatttagtttgctgccaaattntggtaactatataagaaatcatgccaaaagttaccaaaantttagcaactatgacattagatcggngtgtacatcgggattatatagggtgtcgtatgggtgttgcgactgataaaaactaatacagatccgtagtaaccgaaagataattataacctaataatccgcattacac

SEQ ID NO: 76098 - DNA, 389 bp, Oryza sativa
  unsure (1)..(389): unsure at all n locations
agcttgcccgcangcacgccgaacacacacttatcggtgttcagctntatgcgggcggagcggagactttcgaaagtttccgctagatccgagagtaaggtctcttggttgcgcgtcttcacaaccaagtcatcaacatacgcctcaacattacgtcctatttggttacccaaagaaattcgagtagtacgttgaaaagtaggacctgcattctttaacccgaaaggcattgtcgtataacaataagttcctatgggggtaatgaatgcagttttttcctcatcctccctagccatgtgaatctgatgataaccagagtatgcatctagaaaacacaaaaggtcgcaccccgcggtggagtcgacaatctgatctatgcgaggcagggg

SEQ ID NO: 76099 - DNA, 371 bp, Oryza sativa
  unsure (1)..(371): unsure at all n locations
gaaacatgtagcctctgggaaatcatacctcatattttggtatctttttcttctcataaccccattttctcaccaatttgatagctggtttcactccttcagctccagtattcatcggctacatcatttcatacccaaacatgcttgtcangtattctgcaaagattgnggaattgtcattgtagaaagctctataactcagtgtgagcctttcttgctgctctttcaacgctctcaagacttttggatggcaatggccctacaacaattgcaaaactactcaattatgaaaatgaatatctggctgaaccatggatacaacatgtttgcctttaatatgtgcttttgaccaaagacattcactacaagat

SEQ ID NO: 76100 - DNA, 454 bp, Oryza sativa
  unsure (1)..(454): unsure at all n locations
agcttaaatagagcaaactaattctgttaatgataacaaatntaatcacccaaataaaacaattagacatgtaattgaaaatctgttggccatcttgtttaaacatgtgcctgcgggtgcgtgtggcatatatctctcacttgtatgttgcggctctttcttttgacatagaaaaaatatccgtgcgttgtaacgagtaaagaaaatcataacaaatataaaaatattatatgattaaggtttaattttacatgatatgagctctttaagaaaatctattaataatgaaataaaaaaaagttcaactgaagggacctaaagtgaacttattccatacggagtgtacacgacgtccatgaggcggcgcaaaagtgtgggcggcctgtgaacaaaattgtggacaacttaagggacctaaagtgaactttttccatgtggcggcgtgggaatggcg

SEQ ID NO: 76101 - DNA, 415 bp, Oryza sativa
  unsure (1)..(415): unsure at all n locations
tactctccgctgacgagctcactaagagccgggtcttagctaaccctttcctgaagagggtgtactaagcactcctccttccactaagaggtatcccttccttgcggaggcgagatccggccttcacaaacttctcccggccaaccataagtagatcggtggctcgggagcgacacctagccgactagaagtcctcaacctccaagagtaaaagatgatgcacataactccagacaatgatgcatgtgctcacaaatcttcacgaagaccacaggaagcacccacaccaactcgaatccatactctcacacacaccanattcgaatcaaacaccggtggggagatgaatcgagaaagcaaggctcatatgaacaagagagagagcaagccaatggcacaaatgattgcacatgga

SEQ ID NO: 76102 - DNA, 451 bp, Oryza sativa
  unsure (1)..(451): unsure at all n locations
agctntagtcgtcactgccgatcaccggcgtgtcaccgggacacacgtnggccttgggtcacatcgagctcccgatcaccttcggcgactccaccaacgtccgcaccgagcggatcgacttcgatgtggtgaatctcaatttgccctacaacgcggtccttggtagacccgcgttggtgaagttcatggccgccacccactacgcctatctcaacgagcgtagtcaagatcgccctggcttgtgcagagcattacgccgacagtttggcggcagcccctgagccagtggaggccggcggacccccggaggccaccacatcgtgcgcctccaagaagtagatcacctcgggcgacgaggtgcccgtcaaggagataccccttggcgacgatccgtncaagaccgncaagattggcggtaacttggacgccaaatangaaagcacactcgtgt

SEQ ID NO: 76103 - DNA, 213 bp, Oryza sativa
  unsure (1)..(213): unsure at all n locations
gtgacgaattcaaggatcttcgggagtggaacactgctatgccataatgtaactagatgacgttatttgaagtgacaatgtaaacaatattgtaatatatatatnttggcaacacttttgatttatgcaatataagtagatctctcagtaccaaatgctctgtnatattccaatatatgtacctgccagaatttctaataaataatttaaaag

SEQ ID NO: 76104 - DNA, 461 bp, Oryza sativa
  unsure (1)..(461): unsure at all n locations
tagcacttttggatggaaggaataccatacaatctgcatcggagtgcactagcaattaattaatggcaatcgtcaagctcttnttctcttagaccctgtttatatgggactaaaacttttaagtacttgtcacatcggatgtttggacattaattataaatattaaacgtagactattaataaaacccatccataatcttggactaattcatgagacgaatctattgagcctaattaatccatgattagtctatatgatgttacataaacattctctaattatggattaaataagcttaaaaaatttgtctcgcaaattagctttcatttatgtaattagttttgtaagtagtctatatttaatactctaaattagtgtctaaatatagagactaaagttaaatccctagatacaaacaccaccttactatgatggctcgtcacaaacacgcctctcaagc

SEQ ID NO: 76105 - DNA, 132 bp, Oryza sativa
  unsure (1)..(132): unsure at all n locations
acctcgatctggtcagcggcgcatggacaaccctangaccaagaggaacacacacacacacacacacacacacacacagagaaaattcttggggtagctagctcaaacataagattcgccagcagcaccctc

SEQ ID NO: 76106 - DNA, 489 bp, Oryza sativa
cggatcttaagcaccgaggctgcagctatcttctaaacttacatctttcagcccctactagatcacgttttgaaagtttgctcaattgattcatgccaacatgggctagcctcctatgctaaagccaacccaatgaagtttttgcaactaaacaagttttcaaatttgctttactagaattgacatcaaccaaataaagatttccatatctaaaacctttgaacacacaagacttgtcaagaaggctagaaacaataacttcttgcgggaagaaagcatatgacaagccaagatcacaaatttgagcaactgacagcaaattgaaatttatagatttaacaagagagacattatcaattgacaaatcattggagatagcaattttacctaacccaattacctttcctttgctattgactccaaaagtcactttctcttgttcattccctcctacttcaaatgtggtgaacatagccctatcaccggtca

SEQ ID NO: 76107 - DNA, 177 bp, Oryza sativa
  unsure (1)..(177): unsure at all n locations
gtctaacttgagctccagttctgcccatgtagaagcagtggtggccaagcgagccccgttaagcttgagctcacccacctcacctgtccgcgagaagaggaacatcggtgatgatatctggctaaccccctcaagctccggtgaaagtgcgtanggagagggggggtggggaagatg

SEQ ID NO: 76108 - DNA, 468 bp, Oryza sativa
  unsure (1)..(468): unsure at all n locations
agctntgcagtaacaaagtgtcttgcatttcttgaatattattactacataaactaggaattgaaacaaaaatatatgggttaaagcctcacatgctaaccgtatacttgttactacacaaaagtagaagcgttactacataataggtgcatgttaccacttccaagtagatatgttactgcatgataaatgcagtgttactatgtcatttttacgagatgaagttcgaataggtgggccataggtaaagtttgtaggtagctttgagcaaggtctgattgatgtaggagtgttttgaataattctatacatttagtaaaaccatgttactgcatgtatatacccctgttactgtaaattacacattctgttactgcatgtggagggctaaagttcaaaatgtcaatctttgaaaagcaatatctcacaagatatgtattattntttacnaccgtctccaccatgatg

SEQ ID NO: 76109 - DNA, 414 bp, Oryza sativa
gggctggaggaggaagaagacatatataaagagggagataattagtcccggttgatgttatcaaccaggctaaagatcgccgagatctttagtccctgggggtctgacaaggcctaacatctttagaaccgagactaaagatgatcttaccaaccgggactaaagatcatatatgcccgctgtagccaccaaccgggtttttagtggaaccgggactattgtggatttcggaactatgataagatctcttgtagtgacggcttgtttggctattagagaggcagtttgagacatacggcacacagtttcataccgtgtgcgtgccaagttggcaattggatcctagtagcagcaaaatttgaaacactcaacccaacccaatccttcttctcttaatcttctcttcctactctt

SEQ ID NO: 76110 - DNA, 415 bp, Oryza sativa
agctttatgccctgataatccaaactctgtattctatctagtagaccctacttggcaaatgcagataactctctcagtgaaatacttagggattgagagaatacatataaccaaaaaaaacataaatgcagaatcttacctcaacgcgtccatgaacaacgacgaccttatcatccagattatttgcctttacaatttcacgagcctgcgcaaaaaggagtacatttatttgccgcagcatacccataagagtagttacttttcaaaatagtatgatccgctagattactataaatatgacactaatattcaatatctgcaaagatcaagatcaatacactattttaatatattggtatatactctcttgtgagttgtgactggtagtattaactggtaactggtattttataga

SEQ ID NO: 76111 - DNA, 274 bp, Oryza sativa
  unsure (1)..(274): unsure at all n locations
accgcgagcatttctgatttcttcttctgtaattaccgncttcttcttcttcctctacgtacgaaaagccaaaacccaaattcgctttcccccccccccccccccaaaaaaaaattgctcttgcggcgccgcggattcttcgtctccaccaccggcctcgacgtcagatcaggtataaaatccgtacgcggggttcaatcttctggctggttgtttcgatctggttcctgcctttgatcgagttttgagggtgagggtttgttttggttttcgc

SEQ ID NO: 76112 - DNA, 464 bp, Oryza sativa
  unsure (1)..(464): unsure at all n locations
gcgatcctntanagtgcactctgccagcatgctgtgcctgcgtctccataatgggtcagaatgcttgtttcagatcgaccatttgtcacacatacaattgatgtcgctttgcttaaccataatgtgataatgctagtaccttatataatgtcgcacgtgtacaactgggactgatactgctcttttcattatgaacctctcaccagaggccttaaatgcctaagcatgatgggggttctgtaattcaagagaactccaggttgagataatatagccttattgctactacatgggctatactattctatctatgccttaccgaagaaatagccatggttctatatgccccaccatccatgggatacttcggcttagctgacacagtatcaccattcatgtcagactgagaaggaagagctatacatgccttatcatcatcgtccactcctgttgcagcttgtaca

SEQ ID NO: 76113 - DNA, 406 bp, Oryza sativa
  unsure (1)..(406): unsure at all n locations
ggcaggagaatgagagcgaaatgggtggaggcgggttcttgcctctcttctgctattgccccccctcccgcccgtgcacgacaaatacgattgggtgtgggttttgcggtctactggaccccgtgcgcacagctcgtgctcgtgttctggggacctgcgtgtaccaatacccggtgcatggagggagccgtntgccaattggagatacaatgccggctacgctcacgctcactctcgcnattagataaccaatgacatgtattggcccaccgacatggatttttcacgatttttttgaaaaacctatctcatacatagaatttttaacacacttattctatatatggtctttctggtattgagtctctgtccccgccccttaccaccgtggtgtgcgatattgaca

SEQ ID NO: 76114 - DNA, 430 bp, Oryza sativa
  unsure (1)..(430): unsure at all n locations
agcttggtgggcctccaggcctgttatatattctgtgaataagacacggccactgaaatccatagtatatgccataatcgacaatgtgaactttcttggccttctccacagcattcaaaattgtttgattggcaaagtaatgagagatcttcttaaatgggcaagctgccaaataaagctggtacgctttcagcacatcagtgcatggaagccgagttatcgtgtagttcttgtaaatttgactaccagtacctgccagcctcgcctcgaggccgttggcgaagcagtgtgccaaacgctgatcaccatcaccattggcatgagcatgctgcctgatctgcttcaggagctcagttgcactgcgcctgtcatcagtggccacagactgagcacaatggatgagaagggtctncaggtcaaccacctcctt

SEQ ID NO: 76115 - DNA, 394 bp, Oryza sativa
  unsure (1)..(394): unsure at all n locations
acgggcacgcccgcgggcataagacgcccgcgggcaatgggcaaccatccttacccgtcatgtagtaattgtaggatcaaggaggccgactagaggggggtgaataggcggttttaaaacttaatggcacttaaacaaaactaacctaagttgctaggcaaggtgaggtgcaaggttaactaagcaactaagttaagttttgcaaacctaagtgatatgggctcaaatatgtctctatgaatgtaaatagcacaaatgtaaatgcaacaaataaatgagacaagagacaaggaattnttcaccgaggttcggaaactcgccggtttcctaatccncgttgaggcgagcccaactccaccgctcaaccacgaagccaccgcacgcncncttcgtc

SEQ ID NO: 76116 - DNA, 442 bp, Oryza sativa
  unsure (1)..(442): unsure at all n locations
agctcgtatgaatggtcgatctctagtggtcttgattgtngctatncatgattctttggttttatataagaggatagttttaccattaattgagacgtcacacgctcttttggatttatattgttcacgggcacttagcttatgatgtgtaatatggccgtatgcatttctggttgggagaggccaagagtttatttctttatctgatctaaagaaatagctagaggagtaccgttacttgcctcgagttttcataattttcctcaacaattgtgattaactttgtctttatccagactataccactgagtttgttaattgtttctaggcaatatatatacactacgccggactaggtcatctntgacgggcccaaaccctcaccttngacgggtttggacttggcctgtgattagtggccactgatgacaaatcacatgtg

SEQ ID NO: 76117 - DNA, 245 bp, Oryza sativa
ttaccatggtgcatgctttccggagctatcagtagacctgaaattttcgacgatgatgaaattaagtcatttcttggaagagtatattaaggccctatctatatctactctgcttaagcataatatagatctaaaatttgggagcgctgtatggagattgcgaatttgctggttattagtcggagagatgtgtcgatcaatctttaatcatccaacattttgatttttgtgtgaaattgacaggc

SEQ ID NO: 76118 - DNA, 435 bp, Oryza sativa
  unsure (1)..(435): unsure at all n locations
atcctctgagtcacctgcggctgcagctgatggaataaaattaaggcctatcttgtttcacctatgaacattgatgaataaatctatgactgatatcttcagataatatagaactaattattctttgaattttgatatcactatttttcttaatgactcaaggattttatcatgttttataatggtttcaaattgatcgttcataattntaaatttaactaaatgtgttggcactgattaatatgatatctatagattggttaatcttttagcgtgactccctagcgtgttaacagcctatagaagtggtgcaattgaggccatatatgctagatctttttttataattggtggtttaattgaggccatatagtatctatgggttaattattttacatgaaataagatgaatggctcggtacttgaaaatatcaa

SEQ ID NO: 76119 - DNA, 407 bp, Oryza sativa
  unsure (1)..(407): unsure at all n locations
tcatggctctagcatttggcaagtttgcattgtcacggcctgtcctggcagattcaccacacctgcccacaatggaaggtattgtcacaaatgcgcgggatactcgccagtttctgtcatccatagtttggtcaatctgggagggtgtcactttgcttattagagctgtgcatttggcaatcttgttcttccctgcaactgcattgtctccatttgctgatactttcagtgttggatttagaaggagatggcttcgtcttgtgcgccgtacccttgaaatagctgggccagcatttatcaagtggggtcagtgggctgcaacacgacctgatctttntccaagtgatctctgtgttgagcttgccaagcttcatagtgcagctncagcacatggatttgcttacagc

SEQ ID NO: 76120 - DNA, 438 bp, Oryza sativa
  unsure (1)..(438): unsure at all n locations
agcttatngcttgcggaactccacttgaggtgattgatagcttctactagttgatgaacttagatattcaatgccatgctntaccagtgatttaagttgttgaatgcttgatgcctgcaaagtatttccctcaatacatgtgtcttggaagttgaaattagattttggtggttcacatatcaattttcctgacacgcacaagaaaatctctttgcagcttgttacatataattgcttttcatgattagttatagtgtggtatgaactaatggaacaatctcactctgcagaatcaagatacaactttcttaatgttgcattctattgaattntangcttattatntgtatacctccaagttctatcacagcatacttgtacaatattatgcttctttcttgagcaggtgaaaagaactgtccaagcagatgggattag

SEQ ID NO: 76121 - DNA, 395 bp, Oryza sativa
  unsure (1)..(395): unsure at all n locations
tccatgttactcatttatgcaagaactatagataaattctctaatctatggcccatgtcaataggacaaaacgtgccttcnnatttattgacattccatgattttagcttggtttgtgatggggatggaggggaaaaaacaatacattcacaattagtcatgtcttttccgtgtggagatggtaagttggcgacagaggtgcatgatgcagcatgcagngactactggtgatcaccttgctatgaccatataatatccttgagtgatggcctaatgtcctctttcacctgcctttgatactccaatgtgtcaccattggtcttcttcaactcaacgaagagaaaagaatgagcaacctctgaaataccactgcatctagctcaagtctggctttc

SEQ ID NO: 76122 - DNA, 383 bp, Oryza sativa
agcttaatgagcaaactggagtataagaagattcatctctttcacaacgcggcggaggagagatgttggatgattacttatacgaatgaggagacggcgaatatcacgtgattgaggatatgagggacatggagaaaggataatagaggtttgttcctcatcttgacgagcacgataaagaacggaggaatgaggaacagaactatgttagaaaggagacagaaggaagaaaagaacttgtctcaggagaggaggaagaaaaagaataccatgatgctgatcatgatgaagaccgccatgatgatgatgatgatgaggacgacgaggatgatgaccactatgattaataacaaccaattcatcttcatgaagatcaatatgaa

SEQ ID NO: 76123 - DNA, 222 bp, Oryza sativa
gcatcagcatcagagatgttcccgacatcaatttcaactaccatattattatccaaatcaccaaaacaaacatgtgcagtaaaaaatcggtgcaaaaaaaaattaaaaacacttccgcaacagaatatgctactagcgtcatccaatctcgatatcccatcaaccacacaacaagcatcaagtactaacagactactctgctctctacatggagatggaggg

SEQ ID NO: 76124 - DNA, 432 bp, Oryza sativa
  unsure (1)..(432): unsure at all n locations
agctttggagaagaagtcttaggtggagtcctggcttataccccagttgagcgcctgtgaagatggagccgtangcccgctagtccgctgctgtttatttttgattgtcaggccttaagcgcctttgtaataatgtaaatattatcgatataataaagatgtgtcttttatatcatgtttgtgtggtgtaacccggcttttcctgggacggggattaatacactagcattcgggaaaaggcaattttcccggtcgcgacaagctggtatcagagccatctcgactgtaggataagccaagtggataaaacctaaggacatattttataaataaaaattatttgcgaaagttcctttttctcctttccctaatgctatttgcaaaagggttactccgttcttccttcttcggattttcactaatactagatga

SEQ ID NO: 76125 - DNA, 484 bp, Oryza sativa
  unsure (1)..(484): unsure at all n locations
actcagcttgacaccccttttgatgacctttgttacaatggcttgcaaaatatctgtaccaatagcaaatagcagaggagacagaggatctccctgcctaacaccccttttgcaagggaaaaactttcctagtaccccattaagaagaatagaagttgaagctgaactgaataagatctgaacccactcaatccatttgggagggaatcccattgaagtcataatctgaaggactgcagggtgctctatcatgtcaaaagccttttcaaaatctagctntaagactacaattcctctcttagacggcttacattgatgcagatattcaaaagcccagcccanacaatcttgaattgtcttagttntgataaacccatattgattntggtggatcaactgaaccattttcccttgcagtctattttgccatggcctctgaaataattntactgaactattcatgaaggagaaatgtctatagtca

SEQ ID NO: 76126 - DNA, 464 bp, Oryza sativa
agcttagatagttagttaaattgacactagagaagttagttccaacaagataaatgttggttcatattaacaggagcttataaccagatttctaacttagatgaacttatgtttacagattttccaaagttctggacagcaagcacagaggttactaaattaaggacaaacgagttcttagttactattacatccatccaacaagttcttacataaatggagtacatggcagccatattacatatattacataccatgattttcttccaaaatgggccaccatatacctagcgtattccttaagcttgtccttaagtcatactaccgtggcagtagaggttagataggactattgcttagtctctcatcctcagcttgaagactcgaccataccattgaacatactctggcggtccatacggtccagtggttccaagtggaggataagcagtcctgacatcgac

SEQ ID NO: 76127 - DNA, 450 bp, Oryza sativa
  unsure (1)..(450): unsure at all n locations
cttcgagaactatgatgaccgccatgaccttgccgatgccgacccaagaaaaaccaccgcatcttcgagagatgagagagagaaggaagggaaagaagatgttgtcaccttacatgtgagcccacgtctactcaagactaccaagttagcgaaaagcgctctcagaactaataatggggttaaggccctgttcgttttagcttaagattattggaatctagattatntggacaaattactatgagctagattatctatgctagactagaataagctgtgagctatttgtttctttgaattattggaagcatgtattcctgggtttgaaagtctataatgccctcagctattttggatgccttatcttccatttngtcattgtatacaacaaatacatcatttgaagtaaaacatattttcatatagttctctgaatgaaaatcatgtata

SEQ ID NO: 76128 - DNA, 490 bp, Oryza sativa
ttgagtcacctgaggcatgcaagcttctccagggatcgagcagtagttgtagttgtatttctatcggagtattacgcaaggtatcggcagtcatggaaagcttcgttggcctcgtttggaccggccgggtcagagattgactgagattagcagctatcctttgacggaacgttctttggtcttcgtcactgatgactagataatcgcaagtcacaacgtgtctcctgatctcatctttgatttctcctcctgtagctatcttgttgattactactaggtttgtctccgcacacctgggatgctcccagtttagttattatccctctcaggctctgccacgtagagcagaattaccatggctgtagaccccaaggcgcctgttgggcgcgtaactgaatcttttagagatgtttcgttacgatccttgattgccaatttggctggaaagatatggcatctgtagcaataattttgatcgagaaaacgtgta

SEQ ID NO: 76129 - DNA, 481 bp, Oryza sativa
  unsure (1)..(481): unsure at all n locations
aagcttgagcttccctctntctcgacgaccctactctgagtgagaaagaaattaaacagggacaaaccatcgcgacttatgagtatggaaggcgtcaggagagcaagcccttgaaaaccaatccattggagctatcctgtgcagatttttgcatgcatcttgatgagccatctcaaagaagaagtgcagtttggcgtgctaatcttgttcatcttgatccacggagctagcctaacaacggtggtcttggcaggattagccttcgccgagttggtcgtctcacagttgatctcggcagcctagcagtgtccttcaaccacgctcggacgcaagcacggtaagcagaaaggcgaggctgcgcgggcgttcgttcccgccataaagcttctctccatggtttctggcttgctggctcttcgtccctctcgtgtgttcttaggctgcttgtgcttaaatgtacantttgtaattattaacaagt

SEQ ID NO: 76130 - DNA, 332 bp, Oryza sativa
  unsure (1)..(332): unsure at all n locations
tccccgtctctgacgtgcatcagctaccgccccggctcgtactcccaccgagaacctcgtcaacgccatgcagttcgccatgcaccatagccgctccgccaccgccgcaacaggctaatcatctcctcgtcgcaatcggaggaggcggaatcagcagaggcggcagaaccagcggctgantcagagagggtggtggaggcggcgagggcatgggacaggcggcggcggggggaagcgatttgaggtggcggcgacgaacgacacacagaatggctgctaggttcggngagtgataaataaaaaggtggtggaggcggcgagggcatgggaca

SEQ ID NO: 76131 - DNA, 266 bp, Oryza sativa
ctaccggccaggctcatactggctgcgtgtacgcttcctacgtcatgcagatcgtcatgcaccatactcggttctgccacgtcatggcaagctaatcctctcctcgtcgcacttatgcgacgacgaatcaacatacgccgtataaccaggtgactagtgctataagctggtgtacgccgtcatggcatgctacacgctagcgctgtgagaatcgatctgacgtggcgacgactatccacactctcaatggcttgtatgctcagagt

SEQ ID NO: 76132 - DNA, 456 bp, Oryza sativa
atccttagagtcacctgcgcgctgcaagcttttatcattctggcatcgagcctatttgccgcaggacctcccctacagtatcgtcaccgcagtagagtttaaccaccaaattcgggatggattggtgtggttcctctacgcctaggacaccagaatatcgaaccatgaacgaggaaaggcatgagagaaatattggctagtaattgtgaagccccaattcttgactggaagggacaccaaaggcctctgccctccctctctatctatccaagagatggaagggcagagcttttttttggttttttcatcttttcatcaaagagttgaacaatgaagatagatggcaagtgcctgatcgatttgatcaggtcgtgtaggaacaaggttcaaatcgttcgttcgttaggatgcctcagctgcatacatcactgcacttccacttgacacctatttaaa

SEQ ID NO: 76133 - DNA, 444 bp, Oryza sativa
  unsure (1)..(444): unsure at all n locations
cactatttgaaatacgaaaaagatccaaatccaaaatgcaaaggtcgtcttattcaaaacctcaatcatcacattccctctcttccacttcacacctcggaacgcactgttcttatagagagaaaggggctttcccatcttcttaacccgaaatgaaatggctgaggagagggaggttccttttggggggtacccccgggaagagatccagtggagacggngtgggcctgtagctcagaggattagagcacgtggctacgaaccacggtgtcgggggttcgaatccctcctcgcccacagccttccaaaggggaagggcctttactttccccctgaaggtaggaaaaccatgatcgggatagcggacgtaaagctattgaacttgggtatgctctntccttttgtcgaagtggaatcgtagaacagaatgtgatacgatgagat

SEQ ID NO: 76134 - DNA, 323 bp, Oryza sativa
agcttagacgttcaaattatacatgttaagctgtatatttctttcgcgtaaagatttattatcaatcttctagtagaaaacatctttcaaaaaggaagaacttttattttgttactgttattatcctaaactaactgggctagacatgtaactccttcagaaattgtgcccaacaaatcgcacgtgcgtgagctaactttcacgcaccttgacaccgacttcaagcctatatctcttccaactcctaacaagccccacttcagtgacggtgcctgtcttacacgctacgccaccggattcaagatgggcttatgcactgctct

SEQ ID NO: 76135 - DNA, 430 bp, Oryza sativa
tgatcaacacccaaactctatgaacatggctctcaagatgaaccacactcgcttcggtgtgcaaaacacaactgcatatgatgcagctatcacatatgcccgtactgatccatctcacagaaactgcgaaactgcacgatctattatatacgtctcctttggaaaaataatatgacaatcctatttggctttagagaagggtattttttaccccgtttgcacattccaatggatatatgtagcctaattagaaacttatcctgaaattcgctcctacagagatctgaacttaggaccttagagagctactcatatcactgcaaccactgagctacatgccatttcacaatatgacaatcccatagaagtggaagaaagatcattataatcatatatgtaggatacacattatatttttggtcatttacat

SEQ ID NO: 76136 - DNA, 424 bp, Oryza sativa
  unsure (1)..(424): unsure at all n locations
agcttngactcaacatcagttggaatcttgccatacaaatcttccaaaaaaagtgaagttagcatctaaagaaaatactaggaaaaggcaaggcattgaagtttcaaagcctaacaccaaggaaaatataaagtaaagtttgcactcaattgcatagtttacactatagtattgcatacagaattatttaagttctccaacacatttaatataaactccaagtagattagtggagagaacagaaagaaacagtgcataaccaacacttttgtattaggcacatgcacaattgggttgttttccaacagtattagtacaaagtgaagaacaattctataagcatgatttggaatttccaaagctatttcaattttattcacctcgaagatcttcggcatataaagaagcagttagtgcgcgctta

SEQ ID NO: 76137 - DNA, 416 bp, Oryza sativa
  unsure (1)..(416): unsure at all n locations
agagaaattcttagaatcacaanaatgtgcttccattgtactaccacccttcaacgccatttgattttcagtgtacaattgaggcggtgtgaccgctactctgcactntgtgttagcatttcctgaaaaagtagtactctctntttatgacagtttgaccaatagaacacgttacattatggcatacggagaagtacctaacaggttcatgcaattgtttcagttgaattatagcagcaggcgtttattttcctattcgaaactntgtttgattataaatgcagcaggtaaaccataccatatgagtataggaaattatgaacaagactnttgacacttcacctgatggtttgttgatatattgcaagtttaggctttgatcttactacagcctagtttatattgtcctgtttcag

SEQ ID NO: 76138 - DNA, 451 bp, Oryza sativa
  unsure (1)..(451): unsure at all n locations
agcttgaactcatccttgtcaacatgatgttcatgtcttgatgaccatcaacacatggtgtcatccattagtctcatcacgacaatacataactcaaaggaaaacattagtcctgacaaatcagttgtatccttccatagatgactaatcggttgcatatgaaatatatgaatacaatagttgagtactcatcaagaccacaagtgccaaatacttgcatgtaagcttaagtgcaaagatccaatataaactagataataccccgcacgttgcagcgggacatagtgcataccaacgaaagagggaaaattcaatgagaacatttgatccatcacaatacatgtaacaaaattctatgagaatatttgatctatcacatttaacaaataagtgaaattgcgttcttgcccctctttntanggtttctgattctatctcatttgatcaacta

SEQ ID NO: 76139 - DNA, 463 bp, Oryza sativa
  unsure (1)..(463): unsure at all n locations
gtctgagaccaaattcactgacaataggataatagtgaaatgtactggaagctttactatacagtcggtgacaatgaatgtttatgatgctcgcaagtcaaagtcagtgaaagtacttaacctatattacaacaacaggccggtaacagatttgtcagaactgaagaataattggtctctctggaagcgtgctaaaagctgccatcttacatttaatcagacagaattgaaggttgagttccccattccaatcacagcatgcaatttcatgattgagcttgattcattntatgaaaatcttcaagcatcttcccttgagtcattgcagtgtcctcggtgtagcaggtctgtaactgataagcatggcatctgtagcaattgtcatgaanatgcataccaatgtagacaatgcagaaatataactatganaccttgattctttctctgcatgagtgtggataca

SEQ ID NO: 76140 - DNA, 462 bp, Oryza sativa
agcttaacaatggttacggacgaacatttgagttgatggatattatgactgaaaatcgaccaacctatgaggaattaggttgcctgttgttttgattaggaagaaacatgcacccaaattcgcctcgacgagggcttgaacttgggtggtctgggcgtacatccacgccctcgaccaacttatgtcaggtcaatttttgtgtgtgaaaacataacctttgtattttattgtttattcacatatctttgctattgtaatttgttgtactgaagcgatgtcagggaaagtttatatctacggttgttatgggcatcgaagtacattattgctcagttcactagggcttactgaaacagaattaagatgaatattatatctttctttagctaggcatgtcaaattgctgaagaaaacgtgctcccaaactgtcattacccatttgagcatgttgccttatcatgt

SEQ ID NO: 76141 - DNA, 462 bp, Oryza sativa
  unsure (1)..(462): unsure at all n locations
agctttactaattgacaccttctaagaagcattgtacctatcttctanaaagctgagtaactatagtataaaaggattntaaggtattgngcacttgatcacgcgcactntggcctaagcaaaanatgcctaagtccctaaaagaacgtgacaggccacatctaataatatgggctgcagacatattaagcctaggccaaaaaatatgccttcgacaccctttaaaggatgatgcatgtaacatgctcccgagtaataaatcttccgggtgatatagaccaagtgtagctcatatgaatagcttctgatctgagtgactatcccttatgggatacttcaatatagatataataattgaatcccgactggcgcatgtattcggttgataacccttacggngaataaaaaatagtccagtctctaagcatacaaaatagacccatgatcattcatgtcgcatgc

SEQ ID NO: 76142 - DNA, 457 bp, Oryza sativa
tcaaaccaaccacagccaatcagaataggacacatcacccagaccaaaactggatggcttcatccaaccaaatcggccggatgcactcatccagcatattgagagaatattccctattctggcccgccccatccaccctgccctccaaccaaacaccacaaaaattcggacggccatctcccatccaggctcatccacccaaccaaacagactctaagccatcgctcggcaaggccacaactgcatgcgaggctgccccttacccaggccatcatcgtctcgcccttcagcctctcgatctgtaaaagttagttgcaacgggtatggtatgggtacccatcacccgttcaggtatgggtacgggaaaatatattcactagtgatcgggtgtgggtgtggagcggacgatttagtttggtgtgggatgagatatgacctgtactatttaccatatata

SEQ ID NO: 76143 - DNA, 433 bp, Oryza sativa
  unsure (1)..(433): unsure at all n locations
agctntatgttcggcgcagtactaatactggaacttatgagcaagaattgctctatcaatcaccatctactttagacatatcttctgaaactttnttcaaatccaaaagtccagtatcttcctacaaattagtgaattaggaggagctctttgtgccgaaaaagaaagagcagggcaatatttcaaacttgcattcgaactgcgaaatatttatacaaaggaggagagatcaagataatgcagcagggttggttatctaattggctagtcaaacatgaggtggttcatagatctttgggcttcgatcatcgaggaatagagactttgcaaataaaagcagaggattgggattccattgctgtcattntatatgtatatggttacaattatttacgttcccaatgtgcttatgacgttgcacccggtggatctt

SEQ ID NO: 76144 - DNA, 305 bp, Oryza sativa
  unsure (1)..(305): unsure at all n locations
ctcagcttgtggctggtagaaaacatcgattnttcttttgagatagagttcgatcctcaactatttctcgcgatatcttcttacgaagttttgttagggcatctataacagcctctggtttatgtgggcaacccggcaagtagacgtccacaggaattaacttatcaactccccgaacagtactataggaatccgtactgaacattccaccagtaatagtacaagctcccatagcaatgacgtattttggttcaagcatttgctcatataatctcactaaagagggagccattttcattggtact

SEQ ID NO: 76145 - DNA, 381 bp, Oryza sativa
  unsure (1)..(381): unsure at all n locations
gatttggatttaattagttaagatatttcaatgtcctgtataatgagggtattatggggagtggacgatatattatctgttaactcaaccgatcgctttttgtgataatggtctcgcagcaataatattattgtaggttgtccataatagtatgaatagttggactcagtggcggactcaactttgaaatatatatgggatggaaaacggagatgttcactcgataagagcaatcgaacacaacacatatcttatatcttatttatagttcaatcacaaaactgcctcgatcattgtttatggcgtacgcgtgtgtaataccccgtatattaaaagatatntatngttttttagtttgggttgaccttgtaaaataaagat

SEQ ID NO: 76146 - DNA, 458 bp, Oryza sativa
gtgcaagcttgatggaagttaatatattttacaaatggtttatgttaaaaaagagggtttattcttctacgtggaagtgtgttttttctccttgcttctacataaagattaaactgtactaaagaatatcacattttaatgcacatatcctcctcatcagcatttatgcttgcagagatttgatcattaattgccagttcatggagtggactaattaaagtggagtggcggcattgcagatttgcagttgtcgctttgcgctccgcgcgcgacgagaaagaaacgtgacttttagatcctgcgtaccaacaaacacaagaacgacgaaacaactcaaatgtgtgtcaactcggcgctaaaagattatcatttccatggtacaaatataccttctgttcctgtgcatatcaactgcaaagtttaagtttaagcttatcttaactatacatctactaaat

SEQ ID NO: 76147 - DNA, 415 bp, Oryza sativa
tctattcgcattgagtggcattcctcctcttcatgctgtctaaccaagcaattagagtaggcgatcggaaaccatggtgagcgcggtgcgaggatgaccaacagattaataacgagatgggtgaggaacggaggctatcgatcgaggcggacctggcaggtaatcgatccgtcgggcgagacgcggccattgccgaaagggacgaggcggaggtcaacgacgggggagaggccgtcccggaagatcctcgcgagatcgttgacgacgaagccggagcagaacgggcacagcgtctcgtaatagaccgacatcgtgaccctcccagcggcgcatggcgccgtggcgaaggagaacagtacgagggacaagatgaggattcgaggaagaattcgcgaggaggaagaacaagaacaac

SEQ ID NO: 76148 - DNA, 453 bp, Oryza sativa
  unsure (1)..(453): unsure at all n locations
agcttagctccggagaaaaaatctgcatataaatccatcaggataggttagcaatcatagaaattntgcagtccttgtctgctagcatgtcagtatccaaaggatgaaaggagaggtttgtctgattaacgagtttgacttggaattcaggcaactntcaaccaatcatgccaaggatgcaaacttctcattctggcattctgcaatacagcatgcgtggattacgaacagatcttggtttgtttgcacgttggactcaagagctaatctaaccgtgggtctttttttaagtacatgttttatttttttttggaaggaaggcaaaagctttgccttgtatatattaatagagcaggagaaaattatacagaggtatatacagggttagccaaagaanaacgaatagcgcacaaaaggggaattaagaaantaagtgatatctcccacaattct

SEQ ID NO: 76149 - DNA, 425 bp, Oryza sativa
  unsure (1)..(425): unsure at all n locations
gtcacctgcggcatgaagcttataaaatacgttacaaaacttaatttggaaccactattgntcttatgaagtactttgagtgaaaacaaatatttgcttttgggtggtcctccagagtttcatttttgagatcattagtggtctacgaggagctggaaccaattcatgcagttcatcaatagatgcatcgaaatttccaaatggtgtgttacgttccgctcttttgcttccttgtagttgaattgtataacaaggcgctattcactaactgtatctctttatttcagctacaacaccagtagttgaattgctgtcagagagtgtgaatcagctgtccattaagaatgacagtgacttggtaggattgctaatgatacgttcgtgcatgatatgcaataccctntcctgactgttcgattaaatgc

SEQ ID NO: 76150 - DNA, 339 bp, Oryza sativa
  unsure (1)..(339): unsure at all n locations
tactcccatcggctgattccgagatgctgtagccgataatgattctaagccgatgacgtctttgccgattaccaaatttcactgttaacaatattttagcaagtttatattaaattntctaagcaatatgaatattccaatactagaattaaaaataacaagcgtccgtattaaaaaccggagatactattaacttgggtttaaggtggaatnggggccttaaagccacgggcgagagatggatggagtcatggtctcatggagacgagaagaggaggagaagccgaaaggaataagtacacctaatggtcctcaacttgtcaccgagtttcgaaaaca

SEQ ID NO: 76151 - DNA, 245 bp, Oryza sativa
  unsure (1)..(245): unsure at all n locations
gccggttcattgtgactctttctcctttcctggttggaggttgacagctattggcgcgtagccaagggaggtgtaacaacttagaaatgtcttgggctattgaccggatgaataaactatctttctacacctattttaggcgggtgacttagtggtgactgatancttataaaaagctcccttttggtatgcactttgaatttgagcaaggggccgggttctattccctttgttgagaagacgtc

SEQ ID NO: 76152 - DNA, 460 bp, Oryza sativa
  unsure (1)..(460): unsure at all n locations
agctntatatagctggcccgctgactnntttatatagtcatggtgctgtttgggtttttaagcaattgattggatacaatatcattgcttttcgccacgtaagtgtgcatttttattgaccaatattatggcttaggctgattatatattgtggtcatttttcaggcggttggtgaatcctttatgagtttaattactcggantttataccacatatgccatatatttccaggtgtggtggaaccatgtgtcttctagggacttaagcacatctgttaaagcagtgtgcgcatggcgtatgcccaatactatggaaatttctttattcacaacatacaagcttctttatagctgttttgctatgtgaattttcaatgatgtagccaactttaggttacactcatcatattttacaaagcagtcggtatatcacttggatcatattattcagggattcaca

SEQ ID NO: 76153 - DNA, 430 bp, Oryza sativa
  unsure (1)..(430): unsure at all n locations
acttctcttcatgccacgagtgccgattggcttggattgtggcttcgatgtccttccgctctcgccattcgggtaatctttgtttagttttttctagcttgaattgatgttgctcgaggtatgcagctggagtgatggtgttcgaaagatcatccgggatcagagcgtgaatttctcgaagtcttgcccgaatggaaccacaatcaaccacaaaattgtttaaagatgcctctagccgatgagatatatcttcaagagttcttttgacatcttcgtctagaggagctagggtcttgcttggttgttcatcttttgcctcttgatcaagataatccttgatatcaaaggagaacatatcagctaatacctgcaaaagtggaaattgaagataatngaatatcaaaatatgttatacagccgatctgggaat

SEQ ID NO: 76154 - DNA, 405 bp, Oryza sativa
cgcaagaatgaactcttggctcaacttgaagaatgcaacgccgagctaaacatagaacataaaaagctgaccgatctcccaaaatctgttgaagaacaaaaggctagattgagatcggccatcaagaatgtcgttgacatgaccaagtccctaaagggttattttggaaccgatgctcaagacgctcaagccattgaagaagtagaacaaattacgcaaagagctattttggctatccagcgatatttgtctccgtgacatcctatgtaataggtcctagaaattctttggaatcggctaaagataccctggtactttcttatcttgacaatcctttgtgccgacgcaatataactccataatttgctcacaaaatttgtaaattttcatatatgctgcccccta

SEQ ID NO: 76155 - DNA, 438 bp, Oryza sativa
  unsure (1)..(438): unsure at all n locations
gctcttacaagtccttaccaaagcaagcggaatgctgacatactccgactcaaccaagcaccccaatggaggttagatgtatcgatgccttggcaaacacttactgtacggctgcaattaaatttgtggagctctgggtaagcttaaatatatagcaaaggaatagcaaatgctcaaatcagataatacaaagttgaataatcgttcaaagttaagtgtcgtgttggttgtaggctagaacgtactatagacgcgagccaagacacaaacggtaccacaagatagcactagaaacaactcaagcacactctgatttgagtttaacaagtgattgttcttttttccttccttcttttctttnntcgtctttcttacttcttttttntatntctttntgggtgccgccttttggtntctctctatnnntattcacctttc

SEQ ID NO: 76156 - DNA, 466 bp, Oryza sativa
  unsure (1)..(466): unsure at all n locations
agcttgattaaatatgggttaataacatattatatcgtttggcgtgtgatccttgaactataatgtangctgttgaagtgtattatcatccggaagacgggaagtgaggtaccaaatctaagccgttaatccatccaaatcgagcaactattgagattgggtacctgtcgataccacaaccatgcttactgggtgctgctccctggtaaatgggtaaaaatagacctgttcggcggccgttttcgtggctgcggcacagccggcacgaatagtattaccctcactgtgagcagccgcagctgcagccgtggtagccggcctgctgaacgctcccaatatattnttctcctttagtctcactccacagtggaagccgcctccttcaatgtcacctcctcacggcatgagaataatcagaggccatcacaacatatattattctttacacctagacacaatcacacct

SEQ ID NO: 76157 - DNA, 433 bp, Oryza sativa
  unsure (1)..(433): unsure at all n locations
ttttctctagaactatagagtagaaaaatttccacattgttccttttcctcggtcctatgaatcaatggtacgagcattgatttattctttaaagaaaacctctaaaaaattggcatagagttacatcctctatcgtcacggaagaaaaaaactgaccaattttattaaggaaaaacttgccctgcagtcatgcaactgtgaagttaattggtgagtaatcgccgaaaacctccacggcgagaacacacttcgaggcggcaagccaccgcaactgatgacccaagaaaattgagacacatcacgagtcattggtgccatgttttaaagtcaaagaccaagcaacaccgactntcctacgttgatccacaccctccacggtcaacaaccganaaaaaaaatcagcaaccacccaaagcgctactccccttcgtc

SEQ ID NO: 76158 - DNA, 373 bp, Oryza sativa
tcctggtcagttcatctagtaccaccaaagcctggaatttctgcagattccataatgatgaaatcagtttgtgacatgcctgcatccaaatctcctttgtcatagtctgcgtggaaaggtttaagagaaaacaatcagcattcagctaaataaatcatcagacctaagaactatgcttcagtacttttgttaggtaaaaaaattaaagaagaagataaaagaaccatatagaagtatcatcagctccatattgaccttaccatgaagctacctaagcaagaaaccaggtgggatcaggtgaaaggatgtgaatcaaatggttgtgcagttgatggttgtcttccagagtcaggtaatagactaataatagagt

SEQ ID NO: 76159 - DNA, 336 bp, Oryza sativa
  unsure (1)..(336): unsure at all n locations
cactatacaaactcaagcttggctttcgctcacgatccttgngaaggattgaatcactgtaagcggacatatgcttgaaggtcatcatgctgttgctgcgtcatgttgttgacgtaggcaaattgagcatcatcaatctgttgccattcttgcgtctgtgctatgtgttccatgaggttgtattatatctctctcgtatgcacattcaccattcttctagtgatttcacccaattcccaacgagaggaacttgagcgccattcacctgtagatcgaagcataccactcgatctacggggttggttgtgcccgcactgtatgtcatgaagcacattg

SEQ ID NO: 76160 - DNA, 405 bp, Oryza sativa
  unsure (1)..(405): unsure at all n locations
agcttctcgggttctcggtctctgccttttttatctaggccaaccccgagaagatacgagctatagagcggatgcgcccccagcaagctcagggatgtgcaatgcgtcacccgttgcatggccgncctaagctcgctcatatcgaggctgggagagaaggcgctacccttatttaagctcctcaaacgctccggcccgttcacttggaccgaggaagctgaacgtgccctcactcagttgaaggcgtatctcatctctcccgcatgtttgatcgccccggagccagatgaacccttgctactctacttagcggcgaccccgcaagtatgtagtgcggcgttggttgcggagcgcgatgaggacaatccttattcgcgcatcctcccctgtgctggcttggcccgg

SEQ ID NO: 76161 - DNA, 381 bp, Oryza sativa
atggcgatgatgccctcatcatatgaaaagataaaaaaaagaaaagtccgattcatcaatgacacggagaaaagaagacccaccgtccgtgataaaaaaggtagaatcttttttgttcttattaatcactctatataccaatcatgtacgatggataaagcacaaaatcaaatcaaagatctacacggactgagagaacctgaaaaaagtcatcctatcaaacagaactacacggagaatctaaaagaatcatcccatcggagtagtacacagattgagaaccctagaaataatgagacatagagaggaaataaatcacacgaatgagcgagtttgccatctgatccggttgttctgagctcgtcactgtcacgcctagaa

SEQ ID NO: 76162 - DNA, 369 bp, Oryza sativa
  unsure (1)..(369): unsure at all n locations
gtgcgtgcatggccggacaatggttgggtccgtctcgtgtagtgtaactagtgaagcgtgcaacaccgtgcgtgtgagttgtgatgcgcccgttcactgacgtccaaattatgggccttgacgagatgactggggaatgtggaagtctttggcctgcgaggttgtcctggtctccaaggtctccacgaggcgccaacangggctggttttaccatgtgcggatattgaagcatgttgcatgttttgttcaaatttgcttttctgtaagttattctagcctggctttgaactcatcgagacttatttactctgagatccagntgagttacatcgtcgaagagcttataagttataagcaatgctcatacg

SEQ ID NO: 76163 - DNA, 399 bp, Oryza sativa
  unsure (1)..(399): unsure at all n locations
tcttctttntctacacgtagaatcattagcgctgtctatattccttgaagatagcaatcacaaacctcactgttcactaattacatgcaaaacacagaaatcctggttcttgcctggatttccagccattcacaatgaggtccaggcatagacttggatcccctcgttgacatttgaactgataactccttgggccttgcttatcgttgaatcagatcagggttcctaatatcacgaatcctggtattatcgttcatcagtgaaatacagtaaccttctggttactggattttactgcactgataactgtcagaataattataaattataaatataatcctcacatcattcctgttggtgaagcatccctaaccagtctcaggacctggactgctacca

SEQ ID NO: 76164 - DNA, 449 bp, Oryza sativa
  unsure (1)..(449): unsure at all n locations
acacttctttcagcttaattagctcccaagtccacccaagttttcccatggatcttggagccaatccaacttaaaaaaccagaccgatttctattctatccacttcgattgattccatgccctggctgaatttcacattttggctggcaatgcatatgcatatgcagaatctttggcagggagcctgcaaaaagtcttggtcccttcgactcctgtacacatgcaaacaactcatctctgcagaaaaaaaaacactgcaacatgttcctggggatgtttgtgtgagatgagatatgtgatccatatcatgcagatgcangtcataaacatgtgcagggcacagtgactgaagactgaagtattactgatctgantgaattctactgcagtagtgaaagggataagtgagtaaagcctgtctttgctttctgaagagctgatgattcatc

SEQ ID NO: 76165 - DNA, 385 bp, Oryza sativa
  unsure (1)..(385): unsure at all n locations
atctgtggatatcttgtctttgtgtcttggagagcttcgctgatgtagtagattggtcgttgtactttctctctctcgacaacgatgatggtgctaacggaatatggcgtggcggccatatagaggaataattcttcattaggttggggggcaacaagtacagggggttgataggtagcgcttgagtgcaacgaatgcctcttcggcttcctgtgtccatacaaatttgtcttgcttcttcagcagagcgaagaaaggttgccctcgttctcccatactagcgacgaacctgctcaatgctgccatgcatacggntagcttctgtacttccttgagtcttgtgggtgacttcatgttctcgatagccttgatcttctcgggattt

SEQ ID NO: 76166 - DNA, 336 bp, Oryza sativa
  unsure (1)..(336): unsure at all n locations
gagaggcagtctacacctttgcgactcaatccctcaccttctcggtctcaccgttgcgtcgtctccattggttatatatatattagaagtttaagtgggttatgtgttccgaggaaataatattttcgtatttatgtctgattatattcgattcttattcatatttaagataattcgtatttgttttcgtaactaagctattcgtattcgttttcttatccgacaaaaacaatatgaagacaaatatgatgtgagtattatccggtcgtatcaactttattntcatctcactagtgggaatgaaagctcgtgcagtggagagaggctccgactggg

SEQ ID NO: 76167 - DNA, 449 bp, Oryza sativa
  unsure (1)..(449): unsure at all n locations
agcttggttntgttaaattgcccaatggttaataatcaattnggacaaaataatgccctctaaacagtaaacagtcaacatcaacgtggggaaatggcctctgagatgttctaaagccatctaataccactctctagcttccaccaatgccgtagtaatatgccgtcaagactgatgggtgagagtgagactgccaacgttggcgcccgttctatacaagaatgtctactacctgacgagttntctaagttagaaacgagagaaatgaggtagagaaatcagaaattactttggccgcggacacccgatcaaactttccgggaagcgaagttggcctccggcggcggcacggcgtttgggggtttggtgggatggactaaacggtactcgaattgtccacatgatgacgtacacatcgcttccatcaggcatcatcgtctagtagcagc

SEQ ID NO: 76168 - DNA, 282 bp, Oryza sativa
ttaccctattatgtccgagcactgtaagttcagtttcagttgcagctcttttccatcctctgtttacttatatataatagacctgcttttgtagccaaatcctgtggacttatcgcaaaaaaggggatttatcatgcagtttttcttctctcctgaaggttgggtgaccgacatggagacattcctgccagcgatcttgagcgacctcctcggcaggtccatctcttacctggtgcagcgataccggcagcaaagcacggtgcaggacgacctcgagaagct

SEQ ID NO: 76169 - DNA, 459 bp, Oryza sativa
  unsure (1)..(459): unsure at all n locations
agctnttagtagtatctcactcaataaactgtgcttatgcattctaagaacgaatttattggataattgagttatattgcacaggctcgagtaattgatccttgtatatttggttcaacttgtggagttgatgtggttgtatctgttggtatttcttagcgacactactgggaatataattcccagcaatagcactagaaataatcctggtatattatggtgacagatatgattcacaagcacacggatataccattgtagcatttcacccgggagtactccaaggtatcgtatntattttatcccaagggaagacatgataagagagaactatgctaacaattcatatattacttatatacatcanagtctatgcatgggttaattcacttcaagggtagggtgcacacagaagaaagaactaaaactactctcactaaatacagtctaagctaagta

SEQ ID NO: 76170 - DNA, 470 bp, Oryza sativa
  unsure (1)..(470): unsure at all n locations
agctntcaaatataactatagacggtataataataactaaaaatgtaatcacgttctaacttctaggtaacttatatataagcggcgaatttctatcacatgactcacgtgcttgggtgttagcactagcagactagctcctgcatgaaccctaggtcccatgtctaaccgaattttatttctgaactacctttagcccttattttcactttagatcccctattcttaccatattgtatcactttggaccataataaaaaaaaccggactggactgacggttaaaccaaaaaaacctgaactagcatcttggtggctcagtttagcaaaaaagactgttcctgcaatcaaaccggtaaaaaaccggtgaaccggaaggtttttatgggaacagtgaaccgatggcggttttttagaatcaaaccggtttttaatctatctatgacaatatggcattatgaatctattatg

SEQ ID NO: 76171 - DNA, 459 bp, Oryza sativa
  unsure (1)..(459): unsure at all n locations
aagatacatgccacacaagatattcagtggcctacaatttccacaccctaaatgcgaaggcctacataccacacaccctaagcattccagattagaaacccaaacttcaccaaatcaaactgaactgtaacaatttagttcagcatttcttcatatgctgatgagatcaggtggcggtgaagatggtgagtttagctgctgctgctgctgctctttggcttcattggcctctgcagattcagctggcactacaagatcaaacacagcaccttcaccactaggaggctcctctccttgcttcgatgtcggcttgggaagctcactgaggatctgcaccacctccctcattgtcggtcgctgcacgctctgctcctcgacgcacagcaatgcgacgtagaagacgtgcatgacctcgtggaccggcacagntgagagcctatggtccaagatcttgatcac

SEQ ID NO: 76172 - DNA, 490 bp, Oryza sativa
  unsure (1)..(490): unsure at all n locations
atctcagagtcacctgaggcatgcaagcttagagaacaatatagtaacattntcaacacaatacaaacatactattaaaatatattcaatattgtatttaatgaaactaatttagtgtgatagatgttactaaatttttatataaacttggtcaaatctaaaaaaaagtntgactagaaaaaaaagataaaataacggagggagtaacatctttcgttgctggccaattcttttggattgtacagggtgttgttttgatcaaggctctttgatttggatcatgcagggttcaggtgtcgtggttcatgatattggcattgctgaagaacggatatgaggccgtgtatgctgccgtagagcagcatctgctgttcgcgcagactgctgcaatcatggaggttngtttctttttttctcttgttgcctctatcgtagtaaaactgtaaatttgattgcagttgtacaaccattttgtttcattgctcatgga

SEQ ID NO: 76173 - DNA, 367 bp, Oryza sativa
  unsure (1)..(367): unsure at all n locations
tctatagaacactcnaagcttatagtggctagctcaaatacacagcgancgaaatgtttgatctcatatttctcgggagaacaatccttcattcctatttggttaattgtttgggctatcggtcttctattctataaatgtcatggatttggtatcctgtgctacaactgtttagatgccatctattttgctgctttgcttatgtcgaatctgaaaactggttgcctgggtatttgactcacggagctatgaaattctgctgctatggttcttgacgcaactatgaattggtatcgaattattattgcggctgcggaacctttatttaacctctaaaatgcacgaccagtaactatagctggccata

SEQ ID NO: 76174 - DNA, 461 bp, Oryza sativa
  unsure (1)..(461): unsure at all n locations
agcttgtgttatgttgcttcccatacaccgaacggaccgactntgatttctctgaccctgaccagaacagctggtgctcatagaacttcctttctttggactgagttgctaatgctggcaattagataaactgaggattcactatgctgaccggggattggtggaatttttcccaaaccttgaaactgacttccgtaatccacagacgttgactttgctttgacttgctcttgattcaaaccacaagtattttcaagaaactggcttgatctgtcccatgtctggattgcagctgttcctgatgctgcttctctaggctgaattgttgacctacttcatggatgtatcttagaattgaatctgtcgacttgagattgcggtaactctgctaatggctcgcagctgactcctttaattactaaccaatctactacactggttgttccctcagtaaaacgatg

SEQ ID NO: 76175 - DNA, 435 bp, Oryza sativa
  unsure (1)..(435): unsure at all n locations
atataaagattgggatggtctctctgtctctcttntttatgatactccttgcacttttattttagagaagaagcagggggctaaaccttttttaaatcatgctcgagaacattttgcatcattctcttttgaccagagttttttttagctcatgtctcatttgacatggatcattggaggagagaccacaaatttttttggagtctttatttggtggatgcttgactcccggtgtaaaagcttagcatgtggaaatggatggaattgctagtcctctggtgtagagagagcaatatttttttggctaagtacacaagactttggtcatgaaaatatgaaaatgtgaaagaatctgacaagggacaactatntggcaaaactcanaacgatagcaagcaacatatgtataanggttcatcattaagatcgacatat

SEQ ID NO: 76176 - DNA, 387 bp, Oryza sativa
  unsure (1)..(387): unsure at all n locations
agcctatcgctcacgtttcgatcctgatcagagatgagcganagcgcaaagcacttaccctgatagagtattagtaagaatgcactcgccacactatgattagggacactatctatacattccncacactatgattagggacactatctatacattccctattgatgaagatgccactcgtgcttaattttctctcacacgttcacagggtgttgatgacttcatacgacctctctgaacagcagttctggattctctcttatcaaagccatgtttgagaataacacgtacaagaagccgaaaagagaaacanaatcgtcttctgattatgttgactggatgtgatccactctatagcacagttagagggtttaagatgtattatgt

SEQ ID NO: 76177 - DNA, 186 bp, Oryza sativa
cgcactcgcgccaggaaaaaggcccggctagacatgtgccagtacagtctgaactcgtcatgcggataattgacattgaccactgcctgacaaaactctgtatcttccttgtgggggcttaggggcttttgataactagactgttaacaactcaattagtaccaagtagtaatctgtttagctgta

SEQ ID NO: 76178 - DNA, 443 bp, Oryza sativa
  unsure (1)..(443): unsure at all n locations
ataataatagctttctacgtatgtatgttccctacaatacttcttntaaatgtataacagctaatccatttggttgtacctcaaatattatcacatcccanatcatcagataatccgttgcagttcagccattcatccattaaagcttggaaataagtgtgatgcaatgtctccaacaggtgcaagtgcacaaaataaaaggaggagaaatagggtggctcatgatcttgctcgaatggcaatgagtgctaggtctagtgctgactggagactgtatgctccccgcccaaatcctagactcggtaaaccaagaatgtaggagtaatcatttattcagccaatgtaaataaaataggtattgggcctactataacctcccacctcaccaaaataaaatctattataagacagcatgatgatgcaaggatcaacactccggcaac

SEQ ID NO: 76179 - DNA, 408 bp, Oryza sativa
  unsure (1)..(408): unsure at all n locations
cccttgatctacaattcttatactttggtacttgataggaaggaaagttcctcggaattgcatggttttatttacttattttgcaaaattttcccttgcattatttcagaagtattgccaagatggaggaaggtgatggaacagtatcatagcgaggccctgtaagttttggacatgctgaacacacaatcaaattacactttgctatatatggatcagttcaacaattaatattgtcaagtgatcagtgatgatcaattaggtttaaacacttatcaactagccgttctctaaacctgactntgcagcaagttntggtgatgctctntntgtatgatttattactgtaatgaaattgattgcattctaatgaattcangagggtggcaaaatcaattgcaaggatta

SEQ ID NO: 76180 - DNA, 239 bp, Oryza sativa
actgagaacatgtatcggtctacatacacatacatgtgcattttagactggcgctcatgaagtggaccttatttaagatgaaatgccccagatgcgcaactaacactattattacttattgattatcatcacaatctgggtgcacctagtctctcaagtctgacattgaggaacataaaaattcgaaatatcaacagttcgattttgagttcaattacctgatcatgatgcacgagcct

SEQ ID NO: 76181 - DNA, 458 bp, Oryza sativa
agcttcctttctgaatcgcttgcctatatgtgtgttatgtttggactgaagatgctgttatagttttttattattaaggtcgctgtacatctgtttggagtcacttcctcttggtttgcaatttgagtacttgtatcagggaagtgaccaatagtaacatttgtgtgatgtcctgttatgaaattattaataggtaatggaagggtataagtttcaatcaaatttaggtaatggaacatacaaatcagacactgttttgcttcacatgaaatttgcacctgttagtaaacacaaaacctaaccggtagatgcaattttggactcattctcatatatttaacagaaacgactttttcatcaatttgtttctattgctgccttgttgatcaagtatgttcgacttactaaataagcttggtttgttagtatggatccttctgattttcaccatcaaaaca

SEQ ID NO: 76182 - DNA, 369 bp, Oryza sativa
aaagctgcagcgctgtcattgaatactcaacatcctgattggacatctggctggtgccacccacattccacagcgggaacgggttctgattcaccattagaggtgccttggcctgctcgccaatcaagttcttttgacaggcgcaaacaagttacgcgaatacagaaattcgcaacataatttcacttgatgagaaagcttagaacatggcttaccatgtggcacagatagttgctctgatcttctggaatttgcatcttctattgggatggaaagagggcaatcaaaacttgattatttcaatataatgtataaagcagggaagaatactgaaacgggttatcctcttgttacatacccgggtgtgca

SEQ ID NO: 76183 - DNA, 455 bp, Oryza sativa
  unsure (1)..(455): unsure at all n locations
agcttgtcaactgactagaagtggtcaacaacatcggtaagatccctaagctagcctcttccccgcttcctctcctcaccttgtcctcaagccggctacccctgtgccgccatcttcccgtggctccccataactggatccgccaccacctcctaactttgttctacatttccccaccagcccaccggcccactatccacttccgaccctgtagttttggcaataccgcggtcgccttgctgcccacccgaactgttgcctcctaggttatcctctaaaactaacgaacttctctaacctaggactctaatccgtaagttctctatcaaaagttggaatgttgccagtgttggaaaagatgaggagatcatcggcgcttaanaaaaaagacaggagcatgaaacgtgaagcacacccaatgatccaaaatatgtaatatttgaagggtatttata

SEQ ID NO: 76184 - DNA, 317 bp, Oryza sativa
  unsure (1)..(317): unsure at all n locations
tgtcgtgtgggtaaagtgtaccccctctgcagaggttaacaaactgttcgaacagccgtgcccacggacattggcggatgtgaggtgattcctagcgtagntctgtttgtctactgcttgtgaaattgctgttgtgaaaaggggttcgatgtttgaaaaatctgcagctgatgggatcagctatgcccgggtggccgtttggaaagttgttggcccgggtggccgtttaaaagttgttggcccgggtggccgttaaaaagctgttggcccggtgccaacctttgttgaatcctaaagattgacacattgcacatact

SEQ ID NO: 76185 - DNA, 421 bp, Oryza sativa
  unsure (1)..(421): unsure at all n locations
gggaaaatggatgagtagcagcttttgttgtctcatcaccaacaaataaatcaatttctggtctcaacagaatgataggcctacagaagtgggaaacactatggttgtgaggaagtttctcatttctcccccaccagcattatctcacacctgtgatgccttgcttgagcggttgtaaaactatacagcaagaatggaactgtagccgttggaataacacagaaatgatcatcaggtttattgtgagttccctaccagtcatgcactcatcaacccatgctcttccagctcaacagaagtattcccaactgggtgccacaccccttctcttccaaagatcaaccagatgtttntaacggattttattnttataaaatctagtggttatacatcatattttacatagactgcattntataga

SEQ ID NO: 76186 - DNA, 452 bp, Oryza sativa
  unsure (1)..(452): unsure at all n locations
agcttcgttgttagaggtgattntaatctgacctctgtagactatcttcgaacatatcacttggttcataactgggaatagttcccacgaacaagcagctcggattcactttctttacattcagtttacttcccattattatcttcaggttgtcctcagttagcactcaacgtattcctttacacctttaaccttgatgagttctttcccgttggatcatctcccaggacatggcattacctggtaaccggtgcttgcacttttcactccgtgtagcatccgataccgagttgaagatttcactccttgtcttcatagaaacacttttacctaggtcatcttgcttacttaatgacaaggtgactgttgcggngcaattactatcaggggtcttccttaagcgatgcagagcatgtttctgtttatcaatcgcctttcgcctacttctttat

SEQ ID NO: 76187 - DNA, 387 bp, Oryza sativa
  unsure (1)..(387): unsure at all n locations
aatgccccaaagacctcagcacttctccaaggactcatcagagaaccagccgatgccggcaagaagcggagaaccagatcatcggctgcagatacttcagccccggctccgaagaagaaggctaagacaaagaaagctaagccagctgacgatctacccgccctagatccatccatcgaacaagctctggatgaagaagaaatcgaggaagacatcgaccaagccgcagccgaaataagcgatactgaaaaaacaccatcggcttcacctaagcaggctcctccattcccttctgctccagctcaattggcaagggtaagcaactttctctgtccacttttgcagtcatttactttatagccgattcctcacaattntaataaatat

SEQ ID NO: 76188 - DNA, 385 bp, Oryza sativa
tgctcctaacgatgtgcaccagaggcggatcagcttgcccttgagaagagaattctctcaaccctcggtgtgctgggcacaaagaggctgccataccccagccactcatatgagcttgcgcactgctctcgatgtcggattgactggctgcaaaaggatgggatcttgttgctggaagtcgatacgggtttgaggcctggcgggtatttcgtatattcatcgccagaagcttatgctatggatcccatcaacccggacatatggagaaagatagtgatcttgctcgagaatgtgttggcagattgcattaatgaggatacacagtgataggatcaaaccatgactaatgagtgcttatgaagagagagccacgacactttaaata

SEQ ID NO: 76189 - DNA, 461 bp, Oryza sativa
  unsure (1)..(461): unsure at all n locations
ctgagcatctgtatttcttcttttccccgcctgctattttctccagatggcttacaccacgagtggtagccgcgcaataggcgagggcagcaactgctaagaacgcgctgatggtgtgcactccaacatcgattccggtaatgggccgccaccacttcccgagaatccgacgctagcccaagttatggcacatcagactcagatgattgcagccatgatgcagcagatgcaacagcagcaccagcagatgcaccagaggatgatgcatcacgccgaacagcagcaccacgcagttggtccctctcctcctcagnccaagctggctgagatcctacgtgttaggccacccaccttcttcagcaccactaaccttatggaggcaaatgactggtctcatgctatagataagaagcttaattctctgcagtgcaatgatcaggagaacgttgctttcgccacac

SEQ ID NO: 76190 - DNA, 177 bp, Oryza sativa
  unsure (1)..(177): unsure at all n locations
tgcagcttgggttgggatgcaccctcagcaatgcttgatgctgctttacaagcgattgtgtattaccgaccttatangccacggttggaccggttctttcatttctttgcagctcgcacaaaccacatcctccgctaattactatccaagtcttgacggaaacatgagagagaatga

SEQ ID NO: 76191 - DNA, 464 bp, Oryza sativa
  unsure (1)..(464): unsure at all n locations
gaccggcacggttttatttggcctactgcagtgtccgacgccgacaaaattgtgcgcacgtgccaagggtgccagttttttgccagacaaattcatctactcagctcaagagttgcagaccatcccactgtcttggccgtttgcggtttgggggctcgacatggttggcccgtttaaaaaggcagtcggcggttacacgcacctttntgtggccattgacaaattctccaagtggattgaagctaaaccggttgtcacaatcacagcagataacgctcgagacttcttcatcaacattgtgcatagaattggagtgcccaatcggatcatcactgataatggcagacaattcactggcggagttnttaaagactcttgtgaagactttggaattaagaattgctatgcctcagtggcacatcccatgagcaatggacaggtggagcgagccaatgtcatgatac

SEQ ID NO: 76192 - DNA, 441 bp, Oryza sativa
  unsure (1)..(441): unsure at all n locations
tgaaataatgtgtatacttactttgttgcgggagataagtatagaagcacctatagctgcgaacgcttggtgtgacaatattggggctaagcatctttctgctcatcctgtttttcatgctctgactaaacatatagaagtggattatcattttatgagagaagggggaaccacaaagtctctttagagccaatatatctcatctcaggataaatatcctatggtnttactaaaccattggcagtaagacactttgaatattttagaagcgatctcaccttccagagtttagattgagggggagtgttaagaatatatctctgtacaccgcgtgtgcttacgattaggatggctagcacttaactatagattaactaggaattgtattatccgtttgattcacgatccaaccgttctatccaaacatgccatacttgtatt

SEQ ID NO: 76193 - DNA, 327 bp, Oryza sativa
tacctgcctgacgctcctattaggattgtatctgaaatctccacaattcactttctagtatgatgatatggtctctggatataaaattaagaatttactccagctctggacttagttcaagtgcttagtacaaataacatgttcggcttcgcgttggagttggaggggatcatttcagtggttcttttgagagctcataacaatgatcgtacgttttctccttgattcataacattagtctatgctacttgatgtgtaaaatgtggtacccttatggtcaattagggcttgtgctatattcgatgagtatccttgggcacaattttg

SEQ ID NO: 76194 - DNA, 471 bp, Oryza sativa
  unsure (1)..(471): unsure at all n locations
agctngccaacggctaccgggttcgccttctttcttatgacaagatggccatgcaacagctccatctgtcgaacttttttgttgtaagttgccgaagtgcctgtggcatacttgcgcatgtagtcgagtgctttgactcttaccccctccaagagttcgagcgataccttccgcccctctttgctctcagagaatatcacctttgatgaattagcccctagctctgtcgtggtcattgcctcatcgccatagaggagcatgaatgggctgaacttggttggccttgtgggggtcgtccgaagggcccagagaacagacagcatttcatccggccatttgcccttcgctaccccctcaagacctttctttagtgcttctaggatcttaccattngtgcgctcggctgccccatttgactgtgggtgcgcgaccgacgcgaacctgatttccacgttaagcccttcgcacatt

SEQ ID NO: 76195 - DNA, 465 bp, Oryza sativa
  unsure (1)..(465): unsure at all n locations
ttgccttagtttcaggtgtataaaagcaaccatctatcataagacgaaagctggccagagcaaatcgggcggatcgatcgatgagggtgatcgaatggagatgccacggctagattatttatgcccctaggattctgggagctgaggaggaggatgatcacatggaagtgatgaggcggtttcacttgagctgtgcacgcacgggaggagcgaaccgcaagccgtgctgggtgaagcttggcagctgatagcatgagagaaatggcttctgcgtgcatgatgagcatgagccttgttctggcttcctctgcctcctggtcatgcgagtctgatgcaactgggtgcatgtgtgtgcaagcaaatgcctncttgntcaattggagctctgggagagccagaaccaaccactgaaatctatctcatgaggaggggatcagccaagtgttcatggaatacttggataag

SEQ ID NO: 76196 - DNA, 448 bp, Oryza sativa
  unsure (1)..(448): unsure at all n locations
ctgggtgactagagcatactgtcataagggattgtgtttgcttgtctcgtgtaaaagccctgattgctagggtgaaacttataatgggtgcatgcaggttttacgtctttctgcagcaactcaagatctacctaggtctgttgtctgcaacgttcatggtgtaaatccaaagttcctcaaggttggtgaaaaaatagcagctgataaggagcatgggcagcagagctttacaaagggagcatatttccttgggaagatggtttgggctaaaggatatagagaacttatagatttgttatccaaacacaaaagtgacttggagggctttaatgtagatgtatatgggaatggtgaggactcacaagcagtgcagatggctgctaggaaattgaatntgtagcctcaatttttcaaaggaagggaccatgcagattcttcgcttcatggg

SEQ ID NO: 76197 - DNA, 466 bp, Oryza sativa
  unsure (1)..(466): unsure at all n locations
gagacgacacaacaacatacacatattatcattgccgagcttgccacccaagcgccacagcagcttcgacttcattgcgatgctactccaacgccaaaatgaacaaataaaaatgatacccacgaaggacatcagcctaaactactaaagaaccaatcctactcacaactagcatcaataatccaataaagagattgcattgtgtcatcattgccaagcttcgtcgcacccctacagcgaagcagctccgactctactcaacaataaccagataagagtgatgaacacccatcgtagagcaaggaacgaaaccaaggcagtgaaggcctcgtcaaaacaccctangcttgtagagcttcggagacattgcangaatccaccaatgacccattgcaagcaaagggttcttggtgctaggagaggtcaacgccggaacgacgcctncaaggaggggaacaacgcctaa

SEQ ID NO: 76198 - DNA, 469 bp, Oryza sativa
  unsure (1)..(469): unsure at all n locations
agcttagcacanaacttaacacanatgtcatcactcatggaaggcacaaggcagagaggatgatgaaaactaacagaagcactgtattttatgccaaaaagaagagaaaatatgccaaagctcaaattcttttagacatgaaattggtctagcatacagaaaaaagatatattcaagtattgaaagatacacgtttccttcttttgccaccatatccactcaagctgaattttctagtttataaatagcaaatcaaatatgttatgtgcactcacattgcttaggaactggtatgccaactgcgttgagtatgtttccttgatgtacaggaatagccttattatctgcaaaaagggaaacatggtgcatcaattccttttatgaggcaattaaggttataatccatctcactagtcaacaccactaggaaatgtgctgcatcatattgtacgatgacgcatattcatag

SEQ ID NO: 76199 - DNA, 465 bp, Oryza sativa
  unsure (1)..(465): unsure at all n locations
agctnttcanactattattactatgagtatattattactatgacaggatcagccaaagatcacaaacgctgattcaaacantctacttgcatcatctcgccccacgagggaatttgccgcttcaggcgtcgcgattcgactttgatcgttatggattgtgaccaaaccaagatcaagtcctatgcaagcgggaaacctgacaaccaaaatcatgcgaacattccttcagagcataaatgggtaacaactaaaaatacatgaagaatcacttctttcgagaatgtgcctgagcacgtgtttcattaagaagatacatgaagaatcacatacccgccaaaatgtcttcactctaaattataccacacgaagccttgctaatgcctcctcttgtaatgtaaaaatcctgtcgacacatcacgatgtgcatagtgaaatcgtaccctgcacagagaatgaagtatgtca

SEQ ID NO: 76200 - DNA, 468 bp, Oryza sativa
  unsure (1)..(468): unsure at all n locations
agcttctgcaatgtggaaccgaagaattgaacaccctcaacagaactaacatttgggatctttatattttgctgtgcgtggtgaattcagctttggactttaaacaaaatctaaacgcccaattaatacatgtttgatgaagtatgcgtccagctctatggcctgcctgtcctccttccaagctgcactcattactgtcacttataatataaatttattcttgtttcttataacgacgtagattatttgcctgatatgcagattgacatgttaacgaggtgagctcatcagctaacgatggtacatacagtttgaatttgtgggcaattatatgtattttctggtgcggatatgtatacaaatgaacatgccatgtgcttgccactaagaaanttggactcacgcacatgctacttccaagaatcagattagagctgaaatgatgattctcacactctactaaataat

SEQ ID NO: 76201 - DNA, 468 bp, Oryza sativa
  unsure (1)..(468): unsure at all n locations
cttcatctttcgctcanggtccctggtagggattgaacccttggaagcgaaggtacgcttgaagatcagcctgctgttgttgcatcagattgttgatgttaacgaactgagcattagcattttcctaccattcttgcgtctgaacgatgtgtccatcgaggtagtactggatctctcctgtctgcatatcaagggtgtctagcctcctcgtgatttcacccaagtcctgtgaggaacttgagcgccaacagttggaggcgggaggcatcccgcttgatccagaggaacaggtgtgcgcgttcccccagtgtacttcacgcggtgcttgccagcggttctcactggcactgtgctaggacgaaccttctgtgttgtgtcgtggtgcttgggtccaaccgggtgcataccccgttggttcccagtccgcctcgtacatctgcatgggtgttgatgatgatgactcctcgt

SEQ ID NO: 76202 - DNA, 249 bp, Oryza sativa
ggaaacaaaatttgattttctgtgtgactttacttacaggcgcatgccttgccaatattttttgaactatatatttagctaaaactgaaaatgctgtaggttattttttgtgtttacatgtacgtgcagacagagaaaattgattaaacagctggctcctactgttaattaactcacccaatatatgagagatatattcatcgtgcgtggaattacaagataagaacctagtgataatacttgttatca

SEQ ID NO: 76203 - DNA, 161 bp, Oryza sativa
  unsure (1)..(161): unsure at all n locations
catgcaagctatacttggggagcctctgcatatgttatgcttcgcggntgagcatgaataattgggtttttgacaaatcaccatctattacatatatgcaggtaattttcagggcaacatattggctccggtgttgcgctcagttacaaaggtgtgatgaa

SEQ ID NO: 76204 - DNA, 153 bp, Oryza sativa
  unsure (1)..(153): unsure at all n locations
actcagctgtgatggctaacaagcatgatggaataggcttcatttaggcgaggcaccttcaatctgttgacttgcctaaatccttnaatcttttccttcctaaccattgaccctcttaccatggccatttaagaacacccaccacattatata

SEQ ID NO: 76205 - DNA, 461 bp, Oryza sativa
  unsure (1)..(461): unsure at all n locations
cctgaggcatgcaacgcttttgatcttaccaaccaggacatcaaactgagcttgagatttgattttacgggctacaaaacacatttataataagaatctgctgcattaaagagaggacaggtcaaattgtcagctggcagtaccttcaacctccttcaaggctgagtcccttttcgcagccagttctaccttgtctcttttcaagacttctatttgcttctccatttgagccatcctggtggcttgcgctgtttgaaatccaaatgtttgaggacccagttatgacagcacaaatgggacagatctagagattacctttcgatgaaccactcagctcgaagttggagtcctggagctgtgcaattcgctcccttaattccttctccgttttcttggcatgctccttggcctcgtgtagctgntccctaacggcttcaagagttcccaaatgtggaaccagc

SEQ ID NO: 76206 - DNA, 445 bp, Oryza sativa
  unsure (1)..(445): unsure at all n locations
agctcgggacgntggaggaggaagaagacatatatataggggtgggactatagtcccggnnggnnagaccaaccggggctaataatcacagggatctttacttccagatgtctcaatnggacgtgaacttgttgataactcatgcttatatgatgactaaataattcatgctataatctatcgtgagatatattcgaatgggaataagtaaacttgtcgtatgtgcgtcatacaacctctataaatatgagagaatatatatacatagatgtgttggaaatgtacaaggactcaagaagccatagttgataatactctgtctattcaaaatctaagtcctcgtatctcttttgtcatcaagatcaaggaaaaattaactcatcctctcatgtatcagaaccaagataacaatatacatgcatacaacctataaacactggtggag

SEQ ID NO: 76207 - DNA, 489 bp, Oryza sativa
gacacttaaaactaagcttggcctgtggaagcgttgacgtagttcctgaagattctcccatgtgacggcggcgggatcttggcgggaccaacagacctgaacttgtttcaccagtttagctcctttgcgaacaagcctgtgattcaacacctgacaaggcgaaatgtctgcagcttcatcagcaggcaaaacgggtaaatgagactgtaccctgtctacgggagccaaagccttcttgagttgggagacgtgaaccaccggatgaattaaactggaatctggcagtgccagacgggtagccacagttcccaccttggccaaaacctgaaagggcccatataaacgaaaagagagtttgcgaatagtgcgagtgatgaccgactggtgcacaaacggttgatgcttatatagacccaatcgccaacagagaaggagcgctccgatctcttaaatcagcctgatgttcattctcatttgagctcgcacaca

SEQ ID NO: 76208 - DNA, 282 bp, Oryza sativa
cactggtggcgcataatattggcaaacaaaatatcctaagtcctaagaacacatgggccagctgttaaagtttgggctgaatactgtctagctatgcccataccccttcgatcccttaatgaaaatccgatatcagcgaccttctcttctcgcggaacttcgcattttccactcctgtacaggtaaagtggccgcgaataggtcacactcggcaatcacttcaaagtgcataaaccttcgtgatcacgctaatcttactctcaaccatctcgaataatacca

SEQ ID NO: 76209 - DNA, 199 bp, Oryza sativa
tcctaatgctgaatcaaccaggtcgagggtcatgtttgtaccgatatgaatcacggatgcgtgtaccagaacatttcacttagtcacatgattgaactaacttgtattgggctcactaacatgcaaaaatacctctcaccaagtagcccgaaatgaaaatacggaagtaatggagatcatcccttttcaacacataatt

SEQ ID NO: 76210 - DNA, 461 bp, Oryza sativa
  unsure (1)..(461): unsure at all n locations
agcttgaaattaaacggtgaaacctgcactgcatagttgactttcagtcccaggcctcagttcatggcctcaggggctcaaggcctggatccgcctacagntgatttatatataatttgatgatatttgctccaatcaattaaaaagtatctcgaggtaccagttcctgatcacgataccaaatcgttttcgatcgttggattatcctgccgagctagatcaacgatcgaaaacgttttggtactgtgagaaaccagtacatcgagatactntttgttggaccggagcaaaatctcatataattttgcagctgttgacaccacatgcgcaggtttactatctgtcagaggaaagaaccactctttacacgatattattcgtcgcttccttttacattctgttagtcgatcatgatctctgacanaattctagtgtagcacagtaaacacccattcttcatt

SEQ ID NO: 76211 - DNA, 428 bp, Oryza sativa
gacacttataatacttcagcttctacttttggaatcttggaagcgactattgagcatttgaactgctttggtgtgaatggtcctagcagtggatgctacttatgccctcatgagaagatagatgttatgatagctagtgctatgctgtagcggaaagaagagtatgcagccatcgtagcttttaatgtcaagatgatgtcttatgcagatgtctctgtcttagaatcacgagtgaagataggtacagctgacacagtgtacaatcattgtttcagttttatcgacacattaaaagatctaaggagttgaagaaaatgcattggcagactatgcatagtctcatgcacgatgaagatttgtctaatcgtgttactcgataaagaccattctttggatgataagtttggaagagttgttagtactccttt

SEQ ID NO: 76212 - DNA, 441 bp, Oryza sativa
  unsure (1)..(441): unsure at all n locations
agcttgccatctgcagatgaagcagataagaggatatatctgcttattcattcaaaagacaaaaaggatagtttaaaggtaagaactatcattgaaggtcaaattcttcagcatatgtagaactctgactatccattatgacacatgtataactaaagcattattgccaaaattacaagtgattacatgcaaaaacacaaggttatgtaccttcatgtcccctgctctcctcccaaatttctgggtaagcagaggcaaggtgtcaatcataccctttggttccggaggtggccgtccaatttcagcgaatgcttcccttattctggccaagtcaaaccttacgatgttgtgaccagcccagacacgccctattgagaactctcaaggttagaacattattcaaccaactaaaatatggcagctatntatgctagctataca

SEQ ID NO: 76213 - DNA, 423 bp, Oryza sativa
agcaccgcaacgagctggcggacgttgggggtctaggccgtgcggaggtggtggaccaacgcccgcaccacctgcgggtcccgcgccagccgccggatctgctcctccgcctgccgccgcgcgtcagtgtcgggcatcaggaactggatcaacaggagcttcagcgactgcgccatcctctcctgttgccggcggcgggggtggaggcgagagggccaaaaaccctaccgattgattcgagaggaggcgtggtttgctcgggtttccgtgtggcggcgcgcgtggggggcgggagtgggcttaatactactagctgggaatatgctcttttcgtttatttctctcctgatgaaaacacgatttttttatctggctgaaccacgtattggaatgggctgggctgcgaatgaactctagtttgga

SEQ ID NO: 76214 - DNA, 454 bp, Oryza sativa
atgaacaagaccatgtagatgtatgtcataaggaaaagctggtacactgtcatgaatcaatgaataatactactgctatcaagagttgatgtgggcattaaaattgctgcaaactagtgctctggtgaggagagaaaagtgtgttacccattccacaaggacattcatatcttgcccccaagtcgatttgctactgctttcaccacttatcacttcaaggacaaggaccccaaaactatatatatctgctttcttggttaactgtcccaacaaggcatactctggtgctaagtaacccctgcaggagaaataacatcccaaacgataagtaaaatgatcctatcacagactaagcaagatgcaatttaagtgatttgacaatgacaggtcaacttgtgtcactagaaatagaggcaacaatagtaagctgaccaaaactgcctggaaaatcata

SEQ ID NO: 76215 - DNA, 472 bp, Oryza sativa
  unsure (1)..(472): unsure at all n locations
gcttaaancaaaagtttccctcccactntatcattntataactctaccaaaacacacgttttcctcccactttatcccttcataactctgcaaaaacacatccatggctttagatctaaactactccctctatcccctaatataagagattttgatattttgcttgcactgtttgaccactcgtcttattcaaaaaatttgtgcaaatacaaaaaacgaaaagttctgcttaaagtactttggagaatgaagtaagtcaaaaaaaataaataataattctaaaattttttgaataagacaaatggtcaaacagtataagtaaaatgtcaaaatcccttatattaagggacggagggagtagaaaatatgcgcaccaaacggcgcacttaatatctaacccgttggttcatatgagtgtgtacaggactcacaatccgcgcatgcaaaatggagcgacatantttcttttgat

SEQ ID NO: 76216 - DNA, 481 bp, Oryza sativa
tatgaaactcagcttttgagcttgatatgacttatgaacaacacgtgatccaactactactccccccatcccaagatatactacttcatactcattaaggaaatcatttaggaaaatggttaagttaaaccttatgaatataaatcattaataactctcaagttgttgagtttgaaaatgtaaaaattatatgtatagatttgtcttgaaaaatactttcataaaagtatacatatatcacttttcaataaatatttttatagaaataagaagtcaaagttgtgttttggagaccgtgtcgctgtcctaaacgacttcctttacgcgtacggagggagtaagtattttttggatctcgtcacagtcttcgagatactactttgaccaataatatctataagaataaaatgagttggctattataaatagttgattaatgataaatctagtaacatcaattctacatcattgatctttttat

SEQ ID NO: 76217 - DNA, 421 bp, Oryza sativa
  unsure (1)..(421): unsure at all n locations
agcttncggctggttgatctctaattaccaaatcaccgtgctgatttttttcaccatagtggaacaaattgtcaaattgagtatttgagttgcttctacgattgtcatgtgcgttatggttctcactcactgaaattcatctcagataaacaaaaggaataagtccattntacctctctcatctcttgcgcttgcgtgaataacatccctcagccggaaaaccgggtataacgcctccttcttctctaaaaaccagagcaaatcacctctctcggtggtttcggaggcggttttgtcctacgtggcacttacgtggcggttgacttcccatgtggcatcgacgtggcgcttacgtggcactaaaataaaacaaacctaaataggacccacatgtcagtgagtaaaacaataaaaataaatg

SEQ ID NO: 76218 - DNA, 406 bp, Oryza sativa
  unsure (1)..(406): unsure at all n locations
acctggagccctttcttggaataccctctatcatatgcattggtgctgtggtggcttgctgagtacgggtggtactcacccttgctatntatatatcttttaggagagtgttgaagagaaacccttgtcggtacgcttgcgtatccaacaagatgattggagggcggtcttgttctaggtctcgatccccagtggactgcctgtggcatgttaaccgggcccttataatatattgtcttccgctgtctgtctctgatagttggtggcccacctggctctaatgtaagtatttaactcttntagcctgaattcattcgtgatatgttgtgattcaactatgtatgtgtgtaccaactactgatccagggattggtactgataaacacagatgatttccgattccaaa

SEQ ID NO: 76219 - DNA, 471 bp, Oryza sativa
agcttctcactgctgttatgttgtatgccttgttcactgtggcaagaaatgcgctgtcgtaaactgttgtgctttgcatgtcctcatctcgttcctggtggtggtgctgctgcttggccagtaattgtccaacctccaagttttgccctcagtagactgatacatatgctgtacaggaactcttaggagaaatgaacttacactgagtgaaacttcagcaaccctttcaaacttgttttgtgcatgttgacggttcagtgaaaagcatgcctggttctccatgtgctcttggagcactatttcgtagtcatagacaggacttgggtacaagaaaaaaatgttctgggggacctcaattgcttaatgtaactaaccacccctttgctacaggctctgcaatgccatgtttcttagagttgtttttgatggctgatcttcaatatcagtcattctactaccagagaagttgat

SEQ ID NO: 76220 - DNA, 471 bp, Oryza sativa
  unsure (1)..(471): unsure at all n locations
tagtnntaattttntagtttgagtttaggataaaattatgtttntcttcataacttccaactctcctttagtgtacatgcatgtgtgtttttcctaacaagagaagaagaagaatctacctaaacttgttcttaaaagtcaaactttaaaaattcaaatattatttggattacaattcaaagttgctttaaattntgttcttgcaaacattcttcactagtaattaagggtgtgtttgcaaaccctttttcccaacccatctccctcgttttccgcacgcactcttttcaaactactaaacggtgcgtttttttaaaaaagtttctatacgaaagttgcttacaaaaatcaaattaatccatttttttaaaaaaatagcaaatacttaattaatcacgtgctaatggaccgcttcgtttttcgtgtttactgtgcactttangaaactggagtagcgaacacaccctaagt

SEQ ID NO: 76221 - DNA, 463 bp, Oryza sativa
  unsure (1)..(463): unsure at all n locations
agcttattaaagacctaggagtatgacttatacgctccacccgaggggtagtctacagacggtctagtaccagataagactctgagtgaaacttgcttgcataagacttgtaattcaagacgtagtccattgttcaagttgtgagtaagtgtagcttggagttctaggtggatgttcaaccttgatcggtctccatcgaaccgctggtatataaaagtacattggaaaaggcaaatcttagtgggattttgagatttggtgggggattgttagaattaatagatgggctaaggcccattcgaagattaattctttgaaaaatcacaaaagcccacctcatgggatggcatgcatgtggagtttagtaccaccttgcttattctaggagagggggacctncttataagggagggatgccctctagcttcttgaagcatgtgtggtggagagaagagggggaaca

SEQ ID NO: 76222 - DNA, 462 bp, Oryza sativa
  unsure (1)..(462): unsure at all n locations
ntcttggacgaaagaagctgcaaaaaaattttatcaccagccggcctaaatttctgacagagctttgttacgaatccattgtattcgtttggttcctataatggaaaacaacacctaagttacaactgagcaagcatgtttaaactatacatgaggtctcgcagcaaaataaggggcatggattacatctaactaccatgcaatcaaatgaaaataaccataggagagattacctgttcaataatgcaggccttccgtaaagcaacaaggcactccagtgccttttggtgattatcccgatcacaggaatcctgtattaaagcggttatgtacttctgcatctcttcaattgccgtctgaacccacgttgagctagatctctgtgtcagcatggcttcaaaatcttgaacaggattatgatcgccaatctccccagccttcttttttggaggatataaagct

SEQ ID NO: 76223 - DNA, 371 bp, Oryza sativa
  unsure (1)..(371): unsure at all n locations
agcttgaggtagtccgggatggtctgtatactcaacgccccacatatgtctntgatccatctgcgatccagcagcgcttttgccaccgtccgatgccagcgcacgtgggccggaacatgatcgtacgtagatggaaggggcaatagatcgaacgcaaccttcttgcagccaattgtctttccagaagaggatcatgtgtccattacccaggtgaacttgaacaaagctgcgacgtaaagaattttgtccagctttgntcattttcaatgatcaatcttcagtccagtacacaaaccagcagaacttttgatttcggacatcacaaatctgcacaatgcgcgtgaaattcaccgattaattgaataagacac

SEQ ID NO: 76224 - DNA, 458 bp, Oryza sativa
  unsure (1)..(458): unsure at all n locations
ctacatgccagacacagacgaactacggtgtgaaaaaaagtggaaacaaaacaaccaaacaccgtatgaaatatctgaatgtatgaactctctacatcatccataaattntaacttatattctatgtttctgtgttactgatttgacttacccttttctagtgtacatcgagaaggaagatcttacccaacaaatcatagacaaaggcccaccaaagaacgccttaagaggtcaaaagaagacaaaaacgaatggccagacaccgttaaaaaattcagaaggtaatgcctaaccatntaacatttatatagatctattactaagttgtcgtacctatgtagagttgacttacaaaagaagagcctttcattacctacattaataacaccgaggataacaaagtgatggtgcatattgaagaagtggagggtaaacggaaaaaaatgaaagtactaaca

SEQ ID NO: 76225 - DNA, 475 bp, Oryza sativa
  unsure (1)..(475): unsure at all n locations
agctttctgcaggaggatgagacacgtaatctaaataacatggaccggtggatggatcttgtaaaagaacacaccgttcgatcatctatataggtaatttatgttggaccaattaagaggcttatatgtgagtggaaaaccatcaggccaatcaagaggcttccagatgaaaggtctcaacaagtagataactcatgtacctagattttttttttacatagtacaaacattaaacttcttatcaaataaagaaaaaaaaggtaaatgaagctagctcagccgtacattcgttctgaatttattggccgccatgattatccttaataagggaattgtgataaatttagcatgagatcacattctttaatttcccagacattctgtggtcacatgtggatggaatgtcctaaatatgtatatatgcctatatgtaattntcaaatattctcaattcacagnttatatgcatatacaa

SEQ ID NO: 76226 - DNA, 477 bp, Oryza sativa
tgacgctacccctacctggcgcgccaactgtcgaaactagatttcggcaataataaaagggggtggctatcaagctagaaaagtgtatgggtttggagacaaaggatttatacaggttcaggccttcttattcaagaagtaataccctactcctgtccggggatgaatccgccgagtgtattattgattgtatgatttggagaaaatcaacatccgcccctagaggcacccggaccccccttatatatgggaaggagtccgtgttacaaaagataatctatatccctaacggaatatgtagatacagataaaatacagccgtaaccgactaagtctcaaggtgtttccttgatgtacaagttaagaaacaaacccgagatacaaataagatattctatctatattcggtatcctgtattcagcccaaataccgtcgccgtgtagatatgggatatccataatctccacacatatata

SEQ ID NO: 76227 - DNA, 477 bp, Oryza sativa
  unsure (1)..(477): unsure at all n locations
cgcagctntctgtttctgttccatagatgcacacactacacagtatcagtatataaatgtgtacacgtatagctgtgtatatctggcaatgccagggagtagctntacgattcggttgaggctcatcaactgcagctgcagctgctgttgctgctggcagagtgacttgattccgcgctgccgtgctacgtatactactggtatccgggtagatatagaccatgtttagcgaatctacatgaagtattcaatatgagctaataaataaataattatacagattgcgactaatttgcgagatgaatatttttaacctagctgctccatgattcgataatgttgtgctacagtaaacatttgctcatgacagattaattatgtttaataaatttgtatcattgtatcgctgcttactgatagaatttataattcgtttcttattagtggctgaacatctcatatgacaccttatataat

SEQ ID NO: 76228 - DNA, 422 bp, Oryza sativa
  unsure (1)..(422): unsure at all n locations
tctatgtataaaattcctatatagaatagaaaatatatttctatgtataaagtctacatgtacaaagtntatattcatgcatagaaatatcactagcatatgggccaaaagtctagcaaactaacatacgggctataacacatggccagaaggccaaccattacttgcagcccacgaacaacaccatacgaagaaaaggaaaaatcgcacgatctgaccggaaaaagaaacggcagtgttgagcgatcgcgtactatatggacgtgactatgtatgtagtgatagcttgtttatctaaactagctatcacaccatctataagagacattggtcttgtttggatcctccgagctattaaatagccctccggaatcttgctatntaggagtattaaacgtagattaccgacaaaacctatttca

SEQ ID NO: 76229 - DNA, 451 bp, Oryza sativa
  unsure (1)..(451): unsure at all n locations
attacattaacttattgtagtagtaatttaagtgcaaaactgtntcaaatagatatagctgatagctcatgtcccatggaagtttatttccattntcaggtttattttttcattgtgacaattgagcataatgaacttcaagggcttattaatcttgccacaaaataacttgacaggctacttttattccaatatacaactcacctgagctgtgtagtcttattttagacatttcatggtgataaagaacgccattgatctgaattgggggtatcttccagaataaagggtgttcttttttaaaacgaagaagaaaagctataacagcaccacaaaaaagatgttttggtagtaatgtttatgaaaaatgtgacttatcagaactactagtttggaattggtactacaagtaacagaactgcattgcgcttttgatcatttaatcttactg

SEQ ID NO: 76230 - DNA, 460 bp, Oryza sativa
  unsure (1)..(460): unsure at all n locations
ngaacaagaaattatggaaggcacaagcattggaagtacaccagaagatctatcagagtctgtgcagtagttccctaaatatgagctgagcacttgtaatgtgcatggtagggataaggggctactaagcctaattaaggtgttgcttgaccaggcaacccaggtgcaccgtctgggcagccccactacaagggcaaggaagaggagggagataccaaagacttttatttacttcttggttaatgaaaagagatacaaacctcatccttacatcaaggaatttgacctataagaaaattctctctaaaattaaggaaatacctgacagctcaacattatcttatctctaaacaactatgatgcacaaacacttcagaaaaagtgagcattggtgtctaatgacatgtgcagctctgatacgcttaggatgcttatcgaccaaatgtcngatgattataca

SEQ ID NO: 76231 - DNA, 295 bp, Oryza sativa
  unsure (1)..(295): unsure at all n locations
taatattaaccccttggggaagcttctncggctgaccggcggctctcccgcgccattgtacgcgcccgaagccacgacagccaggaggaagaacgtgaggagaaagccaccgggcattggccctgctgccggcatggacagaaaaaggaaaaatagagagatggctgtgccaaagagctcaacttgctcccatatataggctctctcgtggaaaacgaagactccctttccggaataaatatttaatatttaaggataagaattttattcgaattctatcaaaagtttaaaactg

SEQ ID NO: 76232 - DNA, 463 bp, Oryza sativa
  unsure (1)..(463): unsure at all n locations
tatagcagtatcaaagtggtcaataaatgtcttaattgtggtctctggtgtaatgtatccatcaaaaaaggcctccaaccgctcactgcggcgaacagtggatataccagcccagaaagtatccttgacatatgctggtacccattttgccctctcttcaaataaggttgtaagccaatgattatcatgaaggttatactgattgaccatctcaacccattccctctcaaaatcagttgatgtaatagtgtcgaagactacctttttcattcttaggctaattgcctccttatcctcaactcttccagacatttcaggaagctctttcatgatatgccaaagattgtatctgtgacgagtatntggaaatacctcagcaacagctttgaccactggtcttgagtgggtggtaataatngcttcaggtgatttatcattcatacnatttagccatttcttgaat

SEQ ID NO: 76233 - DNA, 469 bp, Oryza sativa
  unsure (1)..(469): unsure at all n locations
tcacaataccacagaaactttggcatgtggcacataaccacataaccctaggtgttatggtccaaacgtttcataaaactacgttacttctcattttgactntgttctaccatacttttttagttctacagtcacatcttatatttttgagcattgtatccaccatataaatgttacatccgttctttttttatatatgagtatgtcaaaatggttaacagtgtgattttgtgaaactttaggaccataatacccagggatatgtggcagtggcatgtgccaaaatacccgtggctttgtgcaacttggatcataataggtgaggtttagtgaaatttactcattaaaattataagaattataaattactcacttgaaccataagaggatttggtccagatggagagataaaaagagctggtccagaattgacaaccgcttctgactgagagtaaaatgcttactggtc

SEQ ID NO: 76234 - DNA, 410 bp, Oryza sativa
  unsure (1)..(410): unsure at all n locations
gcttgtactntatttagaatattcttctctatacatttatggtattggaatacttcccgactatatgaatgccaactntacaatatgttcatcttatgctaattatactgctagcttatctgggagatactttggtacgtgtatagtgtttgcttatgcaattactctatgtcatgacgctgatattagagtagtatctggtagtttaggcatggtgtctagactacgggatatcattatttggggttatatgctgcggatgagaggtgggccgctgatggtgacagctcagtacgggtattcctccgtgcgtatatatagtcctaagttaatttcctggggagggtattcctccttatttagcctttggtgtatggtcatgaagtgttgtcctaatgaactctgcagtc

SEQ ID NO: 76235 - DNA, 462 bp, Oryza sativa
  unsure (1)..(462): unsure at all n locations
ntcatgatatgtaactcagntatcttcctcttctctgtgagtaaaaaggcacaatttagtatccctcattaacccacaagagaaacattttcttattgtctacattgttaacacactctcttgaaaaccagtgccatatatttaattgaccctatatttttaatattacttgcacactgaatcttgacaagtcattgatgaactgggtggtgacatgttgctgcagatagcagaaacttctgtgtgccacagaaagacgtttacttgtctatgataatgagactgtttggtagtctgtttttccagctgttagggctgatctgaacagcccagccgttcggctgtcaatctagaatgcgtcctagccgtttggtgctgtagccactgctagctagctgctttagaagctgtagcagctgctgcaaacaggctcaatanaaacagtgtatagtaatgtngcat

SEQ ID NO: 76236 - DNA, 417 bp, Oryza sativa
  unsure (1)..(417): unsure at all n locations
agcttgtcaaggaatgaatatgagttgaaatggggtggagtctttctcccgggcgattggcttatatagagtatccacaacaatcaaaaccgacttgtgggccccattagccgctaccctgccaaaaatggcatgtgaccattgtctggccggttcaatacggcccacattcggccgtaggattccaaacgtcactgtggtcgtggcacagcgaattttcggcgaaaatcttattttggcttgctctggaaanattatttgaaatactttcctcaaaattcaattctagatgcaaattttgaaattcaaatatgcattgatgcaaaaatcaaattgatggaaataaatatgcggatacataccaatatacctgttggcaaacgtcgcgtcattttgggttccatgtgcaagacatac

SEQ ID NO: 76237 - DNA, 461 bp, Oryza sativa
gaagtacttgcacgcccaaatcggagttcgcatgatgtcgtggcggccgtcagaagttggcgctgccctgcagtccgaatacaccccgcgcgaatcctcttccctttggatcctctccatcgatcctgagtaaaacacgagtgcacgcgtctccggggtataaagacgaggaatatgaactcaagaaagaactcacctgataatttagttgacgtgcacgagcgcgggtaataggaccatcatgctgtatatggggggacgtggatgtatcgatggtgttgatgtcctcatcattcctgcatgttagtgactagcaatctcgacgaatgatctgctatagaattctctactccctttgtattcttaatgtccaaatcgaattcttggagtaagaggattcatatcaagagacgaggcttagcatctttcttggtgagtaagtacttcaaagttgcatgatc

SEQ ID NO: 76238 - DNA, 305 bp, Oryza sativa
  unsure (1)..(305): unsure at all n locations
agcttagctgatctgactggcgataattccttgttggtttggattgctcacgtccctatcgagctaaccattcccaccgncctgactagcttatgatcaatgatgcacgtacgaaaaagaaagtgttaaaaattactactacctctatataatgttatttaatgataacgccgtgacttttattcatgttaaccactcgcattattcaaaagatttactcacatatcactttatttattgtgactcgactcatcatcaaatgttctttacacatgatataaatactttcatatttgcatgaaaat

SEQ ID NO: 76239 - DNA, 475 bp, Oryza sativa
  unsure (1)..(475): unsure at all n locations
acagcttcataatcgggcaattcggatagctctntggtaatgaagattaaagcatggaatggttccagtgtatccttcatgtaactatctaaagcaggcaaattttgctttctggtcatatatatcaatccacaagcctgtacagtaacaagattattcagtcataaactaaaaggcatttgtgagcgtgtgccatagcccatagcatagaattcaactgtcaaagtgtaatgttcacgaacctggtgaaaatgagcgtctaagcaaatatgcaacacataatcagaattccaatcagtttgaggaactgcatcgaagagctgaagaacttccttttctctttgagttggtgttntcttatcatcagatgacaggatattggatgaagtaagatatctgaggatgtgcctaacaactctttgagatgcttttgcccttatgtgggaaacanagaaagacacaaactcgattagat

SEQ ID NO: 76240 - DNA, 377 bp, Oryza sativa
agcttaacggcggacgttccggtgctatccttctcctatgtttgtgagtcggagatgtcagagtgtgggtggaggttactcttctttttcctggctacgaccctctacgggctgaatcttgtaatatttttctgctctatcaataaaacttcccaccatcatcggcaagtcgatcaaaaaaaaaaagggggcggttaacacttcgtgaccttttctttttactgggagatctcaaggatctacgtacgctcgtgttaacacttaacaatgatacgtgggccatcttcgctctttgaaatcttgaaggcacgaaccgtggtgaacaccctgtcttaattttcctcgagacctcgacagatgataatctcactgctcat

SEQ ID NO: 76241 - DNA, 445 bp, Oryza sativa
taaagagccagctcgagccagctcgccgagtcgagccgagtcagcgcttgagctcgttagtcttaacgatccgagccgagctggctcgttaaggtaacgagccaaaccgagccgagtcgagccggctcgatatccacccctatagtagagtagtagtacttgactcatctcacaagaaaaagctgaataaaagcagatcatggcgtggacgtggaggcaggccctagcctctactagtactactagtacctagcctctactagtactactagtacaagcatgcatgcatgcagctcagcttcatgcctccatttaatactactactactattggtcatataatgtttaaaaacgatagtactacaagtctaatactggtcgctgctgtcacactagttaagctcgacatagttcgaggctcgaatgagcaaagctcgagcccatt

SEQ ID NO: 76242 - DNA, 420 bp, Oryza sativa
  unsure (1)..(420): unsure at all n locations
agctntntctattaaaaaagctnttgatatactaaaaatggaaaatnttgtaatatttcaaaagtaagaatgatagctaaagctaacttatattgactatatatatatatggatttttggaacaatgaccaaaacagccatccctccaaaccatgccatctacccccttctcatcaccacccaacaccaaaaggctaatccctcgatctctttccgtagtttagactttggatatcgtcgccaccaaaaaaggatgcatctatcgatggctcatcttgaagaagtccgctatacttctccctcttccctctagataatttaaagatgattccctgtccagctgaaatttcttaagagaagtttcgaggtcgtgttcaaaactttgctctaaaaccgtaactttgtattatattgaatatc

SEQ ID NO: 76243 - DNA, 462 bp, Oryza sativa
tgtggcttgaaacggcctagtcataatgagctaagctaataagttgggtttttaattagctggttaatttaacgagccaactcgcgaattactcatttttagttcactagtataaaaggtcatcgtatgtactattcgtatttagtgttattattacgttaacatgtgatgaatggataagtattaaaattataaagatgatattattggtatttagtgacttgttaacgagccaactcacgagctgagacaagttgattcgttgtccacctctagatctgacgacgtatgcttgaatctagctagtcaaacacaaacagtaggatatcctagctagaatttacttaaaacaaaacctgcaaaagaaataacaaaatatatgaccattaaatatactggtttgcgcaaacgtgcatactttattcctctaaaattgatacgtacatatataaatcaacagaa

SEQ ID NO: 76244 - DNA, 483 bp, Oryza sativa
  unsure (1)..(483): unsure at all n locations
ctcgaccggatcttaagcacctgcngctgcagcttataagtccacacctgaagatgtccttatctggttaaggttcatcattgaaaattgatttatcatgaaatacgacagcttatactatctatacctgtgtatcacgttaaaactatgatatatcagatcataacatcaggaacaattgtttgagagaagcaaaacaaaatagcaaatacacgactcaagggagaatcctgatacagtagagcgcaatgatgctatttcatctgggctaagcatccataacttttagccccatgaacagaggcagaccagttcaaatttacagcatggtttattttattgctgaattagctaaaagaatctcctaaatggctgtgcatttggaatatgtcatagatagcaatggtgctgtacatttggaaaatgtcgaaagaaataaatcacagatcagattgtgaattggaggtgattaccacattctga

SEQ ID NO: 76245 - DNA, 467 bp, Oryza sativa
ggatgaatgtaaagagtgagcctatataaaggatgtgtgcttgtggaggatggtggtgttatatagtgtttgttgtcccatgtcgcatatcattggtcatgatcgagtactttttaggtatatcacataagcagaaagaactaggagcgaaagattcaactccgacaacatgtaggaaagataggccggtccgaatattttggggggctggaacaaaaatgccagtatggatgcaatttaatccttatctgtacttataaaaagcaatagtgtttctgcccgattttcatccaccgacatgctgtctagatcgatcctgtcgttggagagcacatggtttttttttcacgtctttcgattcacgtctgattctattgtgccagggcatttcatacttcaggtggcacaaggacccttggcagcgggccgcgcatggatgggccactgctgccatctcatgtggatag

SEQ ID NO: 76246 - DNA, 369 bp, Oryza sativa
  unsure (1)..(369): unsure at all n locations
agctntatgacgntacaaagataacggtatactttaacatgctatngaaataagagtaaattntacaatgggccacatattttgaccaaggtttcataatggactagggttaaatcaatgttttcactaacatcatacatctttacataagttttcagtttggacaaggggtgagcaaaacaagggaatatgagagaaattcatatgatctacatagggataattataaaaggcaaaacattntaatgtttcttccttcttttcagngngtggtaataactagttctatttctattattcatttgcccaatgtaagatcattttgtccactttaaacatgtcacgtcatgtttagtggattgctgaaaa

SEQ ID NO: 76247 - DNA, 438 bp, Oryza sativa
cgaggggaagtacagcaagggtgctacatggccaagactacaaaggaggcttctgtttgatcttgcgaattctgttctttctgagatcctcgcaccatgcatcgacacgcatccgtgggcaaagttgagtagaaattgctgccctgtttggggccctgaaggacctgttgaggttgtatggcaaacaatggtcaggcagcaggaagagcttgctgtagcacatcctgatgacaagattcttgatccagaatggctggaattcggtgagggcatcaacatggtgggatggcatatagccaggatgttacatggtgatctcttggatgatgtcatactggaattcctctcaggatttgttgcttcatgaggaaaattaatcagattagtttgtacttcgtgttattcatcaatactagtaacagtagtcgagtgcaatga

SEQ ID NO: 76248 - DNA, 452 bp, Oryza sativa
  unsure (1)..(452): unsure at all n locations
gctttgcactatgtataaattntataccataatatgcaattatccacaccatattatcagctattcctacatctatctcaacggtcaccaattctagaaagaaaaattcttcgatgatcgatgatcatacacccggtcgtgcccatggcctacgcccactggctgtcctctccgccatcgccacgctgtcgccgccaaaatccaccgacattgctcccgctcccgctcccaccactgccgccggcctcccgtacgcctgcagcaccagcaccgacgccgtcgtctggaagtccttggacgccagcaggtcgccgatgggccccagctccggtgactcgctccactccgccatgcccgccgtcagccctgaccccccgggcaccttcccgacgacgaacaggtccttgttccccatggcctccacgctctgtatctcccccaccatctcgctc

SEQ ID NO: 76249 - DNA, 459 bp, Oryza sativa
  unsure (1)..(459): unsure at all n locations
ntaatcagtcttccttttaggtgggttagtcatatacaattaggagttgtggtctgtgaccatgtaccttttgtaaatcttaaaatggataactgtgtctggttgaactagtgagtctgttgcaggttcatgatgtggatcatctgaatgctgctcaatattagttcatttttctttgacaagaactgggagatgttgtgccgtgcttaaatattttcatttatgtgacgaatgcagcggagcagtgaaaatcatgattgataaggtaaagtgctgcttgcttgatgcgactgttagtggtgaggttaaacagaaaactgctggaaatggccgtttggtttatacatgtggcttcanttatatgtttgaaacctgtaacaatgtntagtatgtttgttgtttgatcatgtgagggtcctaaatcctactagtaacctcagtattgctagtgaaagaagt

SEQ ID NO: 76250 - DNA, 435 bp, Oryza sativa
tcggatgtgcatcgactacaccgaccttaacaaggcatgtcctaaggatccttaccccctgcctcgcatagatcagatcgtcgactccactgcggggtgcgaccttttgtgttttctagatgcatactcaggttaccatcagattcgcatggctagggaggatgaggagaaaactgcgttcattacccccataggaacctattgttatacatcaatgcccttcgggttaaagaatgcaggtcctacttttcaacgtactactcgaatttctttgggtagccaaataggacgtaatgttgaggcttatgtcgatgacttggttgtaaaaacgcgcaaccaagaaactttactttcagatctagcggaaacctttgagaacctccgctccgcccgcataaagctgaaccccgataagtggtgtgttggtgtacctgc

SEQ ID NO: 76251 - DNA, 431 bp, Oryza sativa
agacctcaaggacactagatggattttcctccgttcatcagaaacccgaatttttcagtgttgacggcgttctgacgcttggacatggggataagtacactaatcaacacaggaatagcttgaaagaaggttcagggggccacaaacaacagcaaactctctctatccaatgcgaattcttgtgagctgtgacatgccgagccaagcacgagacggtcagttcaggctcggcccaggtctgtcgtgtgaggccggctctgtgtcagatactacttgtgaaactgaaggctcgcatctgctgttgatcatgggattcttgggcatggctatctgtgaactgtatttggttagcattgagacaacctgattcatggtaggcctgtcatcgggagattgctgtacgcagagaagccccatttggatgcacctgt

SEQ ID NO: 76252 - DNA, 471 bp, Oryza sativa
  unsure (1)..(471): unsure at all n locations
tgctctggtaagatcctcactntgatgccatccaagtatttcaagcttagttatcatctcacttttttctttcaggcttcctaagttcatgtcaactgaacgtgtaactcttcttgcagggtactcttgctttggaagatgctctatccactggatcaccaatccggacagaggtggatcaattgcgcaaatctcttgaaagtattgataaggactcactgttagaattggctctttcatcaattccagaagatgttctcgagtacggatcagatacccctatggatttgaaacaaaaggtaagttccttgtgttgcaataaatgattacagctcatagccttattacttagtgtgccacaccgctcgacattattaattcatcattgtgtgagaattctaatgatgcctccaccttcttgctttgtttgctcctaaatacctgctccanatattaactgggtgtaatcat

SEQ ID NO: 76253 - DNA, 418 bp, Oryza sativa
gcactaacttattttcacaacaaaagtgaaaacaactaaggtgatccttcacaggaaaatgattattcagaggtaaatataaaaaattagttcaagtaatctctattatgaatctttcctggcaacggcgccagagatgcttgttggaatttctaaacgacattactagaaatataattcccagcaatggcccataaatacttctgggatattatggttacagagttcatccgcaggcgcacggacataccattataccgtttcacccgagagtattccaagggtattgtatttattatatcccgtggcgagatcatgtagagataactcaactaataatatatatattacttgagataatcatattctaagcaggggttaagataatccaagggtagagagacacacacgcattaac

SEQ ID NO: 76254 - DNA, 324 bp, Oryza sativa
  unsure (1)..(324): unsure at all n locations
ntataaagcattggattgaagagatcgaactccanacgagaggaatcgactcgggaaaaattcaaactcggctttagggataaaatcaaaacgaactcgattctgaagaaatcctcaacgattcgctccgattcttgggggaaaaggaagacgagaacgagaggaacaaaacccctcaaaaacccggaggaatccgagtctgattgaggccgaattgagaggagaaaggccgcggcaaagcggcggctcgggcggctcggccggaggtaggggatggatccgacaggtgggccccacctgtcggcctccactatagagggaagc

SEQ ID NO: 76255 - DNA, 449 bp, Oryza sativa
  unsure (1)..(449): unsure at all n locations
agcttgttattagcaagcaaaagatatttaagattatgcagtgaaccgatcccaggagggattgttccattgaggttgntatggctgagagcaatttcttgaagaagtgaacaattagcaaggtttgatgggatctcaccttcgatgttgntgctccacatgtcaatgacctcaaggtgggtacacgatgatatggtatccggaatcatccctgtgatggaattcatgcctaggtttaggttcctgagctgggttaagcggccaatctcaggaggtatgtggccactgatttggttatccggcatgtaaattgttgtaaggaagctcacgtcggcaatgcaagggggtatttggccagtgaggctcagtgatttnnnnnaaagagcgagacgcgagctgcaccctggttgctgcatgtctacccatgccaatcacagaangcaagtgac

SEQ ID NO: 76256 - DNA, 457 bp, Oryza sativa
  unsure (1)..(457): unsure at all n locations
ntgccgtgacgcgtcttatgtngtgagacaaggctcatgtgttgggcagtcacggagcgtgggtaaagtatacatccactacagtgtgagtaaaccaaatctattcgaatagccgtgctcgcggctattgagcatcgggacatgtattacacttggctagactctaaattcttaacttgtgtgggatgggttattgcatgatgaatttttatgctgttggaaccactttctgagaaaggggaaggtggacgttctcataaaaccatgacgactcaatggcgagaagctattcttgggatcacaatggatggtggacagaaccgtcgctgtttaaatataaacactggtactaaaatttgatcagtcaatgctaggtcttaggcttgtgaaaatagatacaaaacttgctatgcgcaaaagaaccatagccatcctttgagaaccactatcatgtgca

SEQ ID NO: 76257 - DNA, 382 bp, Oryza sativa
  unsure (1)..(382): unsure at all n locations
tttgtcagcgtgtatgccattctctgtagcgtgaatcgatcaatcttcctcaaaatcactacattttccttgctctccgcagcttcaggtgctaaggagtagattcatttcgcttggtcaggacttccttaaagaatggaacgggcaggaaacgctcattctcaaggataaggctgtgttcgtttgtgtgagataaggcgagaaaacacctcgttatccgcgcgcacgcctnccaaattactaaacgcggtgttattcgtaaaatcttctatacgaaaggtgctgtaacaaatcatattacatcactcttgaaacgtaaatagcatatactcgataataatgcgctaatggctcacatcgctccgcgtatcttctcaatgct

SEQ ID NO: 76258 - DNA, 468 bp, Oryza sativa
tgtgatgagaagaaagtcttgacaaatgatggttaattccttggtataaacatggttgaatcaaatggtcacaagtgttgatctcgactcaaacttgaccccaagatggatggcgcaaggcaaaggtataatgtagctaagaatgttttcttagtcttttcccggtcttggtgtttggtgtagaccggatttgctagatagacgccgtactatcaagaggggtctatgaagcgagcttgtggatgatcatgtgccatattagttcatatgtatgtaggtgtatttggtgggcttgtctagccaagtgtggtgagttttctcaagtcctaaacaaagagagatgtgggcaaatcctatatgtttgggtagcctcatgtggttatgtcctgtggagtatccttcggagtgtgagccctttctccctaagaaaagttgtgtttcttggatggattagtcatgggttggata

SEQ ID NO: 76259 - DNA, 439 bp, Oryza sativa
gcttcaggagtccctcgaggtcttagatttacaaagaagaaaattcctttgggcgggaggagaggctttgacaggggggaaatgtaaaatcaattggacgcgaacctgcctccccactgcttccgaaggcctgggcatcctaaatcttgagaaattcgcaagagccttacgactgcgttggctttggcacgagtggaaatcacccggaaaagcttgggtgggctctggcacgccatgtgatgatactgataggctcctctttatggccgccacaaccataacgattggaaatggtgccaaaataagcttctgggaattagcctggacgtaggggaggagattgaaggatgttgcgccgcttgtctacgtagcctccaaaaaaaagaacagaacgcttcaacaggcttcgcaagcgaaccaatggcttcttgacttggac

SEQ ID NO: 76260 - DNA, 463 bp, Oryza sativa
  unsure (1)..(463): unsure at all n locations
ggagagcgatggagatcagagggtgtgagggataatatgagggatgagagatctatagagaaaggaaatgtagataatggagagttatgtggctgttttttatagggccagtagtttatttttttatagtggccagttaagagaaccgcttgcgaaaatctatttttataagcgcactcttgaaaagaccattcgtaaaaatatatttttgcaagcggttattacctatggacctccaaatgcatcttgacaagctttcttattttcttcgccataaataaaaatggtgactccatgaaaataattttttaagtaatgtatcttctcaacgatccanaaattaatctctacatatattctctttcatttcgatatagaatgatgcctatattggctgacaaatttcttcaaaatacacattctcacaagccaagtttcggcggctgcagaaatctatcctacc

SEQ ID NO: 76261 - DNA, 405 bp, Oryza sativa
ggctgcagcttgcagaaaacaatcctttaaataacataattttatctgtggaatcagattaaccattagatgttttcacagaagtacaagtaaattgttatcaaagaatttttcgaagatgggtttacctacgatgctcaatgctcacacggtcaattcagattatacatgccagtgtatagatgccacaagaaacaagtgctgaccgggggaaagaagcaatttggtccttggactctatttaaaatccaaatttcatcatcaactctaatatgaactgcttttcccctagaacttagtagtaattccaaaaaagcagagtacaagtatgctttgtagagatcttttacagtctaaaaatataatataagccatgtgtaccaactagtcggtcgattcggcaga

SEQ ID NO: 76262 - DNA, 456 bp, Oryza sativa
ttggagaagaagtcttaggtggagtcttggcttataccctagttgagcgcctgtgaagatggagccgtatgcccgctagtccgctgctgtctatttatgattgacaggcctgaagcgccttttgtataatgtaaatattatctgtataataaagatgtgtcttttatatcatgtttgtgtggtgtaccccggcttttcctgtgacggggattaatacactagcgttcgggaaaaggcaattttcccggtcgcgacaagatggtatcagagccatctcgactgtaggataagccacatggataaaacctaaggacatattctataaataaaactatttgcgaaagttcctttttctcctttctctaatgctatttgcaaaaggtttactgccttcttccttcttcggattcaactagtactagatggtcaggtcagtgaagaagaagacatcgtcag

SEQ ID NO: 76263 - DNA, 413 bp, Oryza sativa
agctttgcgtcatttctggcgggtagaaatccagctccgaatatggttccacaaactacagttgaggacaagtttattagtgtttacgagaaggaaaaattgaagctgaaggagaaaataatagctacacctggcggagttttcctgtcagtgaataagtggtactctgggagttatgaaacacgaattgtttgtttaacagtgcactttattgatgaagagtggaagattaatagaaaaacaataagatgttgtctttcagaatcggatggtttagacttgaacttgttcccacactggcaatccgaaattgctaattatgaggatgatgacaagatggtgttgaagaaggtagttccagattggtgtcttgagccgaagcttttatgagtgacattggagggatcagtgga

SEQ ID NO: 76264 - DNA, 357 bp, Oryza sativa
  unsure (1)..(357): unsure at all n locations
agctttgattgacatctttctcactgccttgctgctnttctgatctcttttttttcccgtttggatatgctcactaacaaagatcaagatctttatacttcaataatataaaatcaagatatgtacactaattgaattccatgcatttatgagcatatattaattggagtttatttagcgtttattcaattccgcattggataaaaaaagactagtcagttggtggcgatgacagcgcaagacttttctgagataccaccacagagtcggtgagtcaagcaccccgtgagcattttgaactacatgctgtgaatgtttcataatacatacctttgtattagtattcctttctacatg

SEQ ID NO: 76265 - DNA, 469 bp, Oryza sativa
  unsure (1)..(469): unsure at all n locations
cggctcgcagaacattaactgtcatgaaacgagcttgtgcgttgtggacttgagggtttgtggcagtacctttctgaaccggcacatcacataaaaagtcggcatcaaatacctccgtagatactgtaaaaagaacatgggtatattaaaaaggcaaaaggtaactgaaaaaaattagtgattagttagaaagagaatatatataaagaaattaaataaagaatggttgtgattggttgagatgaaggtaagtaaaaattatatacggaggtatttgatgctgatgttctttagtaataaaattatctacagaaaatagttgtgattggctgtgatgaagtgtatattaaaaagagaaaatatagctatatcttgagatgaacgtgtactatgaactaataaataattacaacttagctgtcccttaacactgtccaanaactgctagataagcatcatcagctagcat

SEQ ID NO: 76266 - DNA, 452 bp, Oryza sativa
tccaatgcaattctctccgccttgagtccagaggagttcaacatggttgatgggcttgaggaggccaaggagatatgggatactttgcaattggctcatgagggttcacccgctgttcgtgaggccaagattgaattattggaaagaaggcttggaagatttgtgatggatgacaaggagataccacaagagatgtatgataggatgatgattcttgtcaacaagatcaaaggacttgggagtgaggacatgacaaatcactttgttgtcaagagacttctccgtgcttttggtccaagaaatcccactcttgtatcaatgataagggaaagaaaagacttcaagaggctcaccccaagcgacattcttggaagaattgtgtctcatgagatgcaagaagaggaagctcgtgaagtgaggcaaatggtgaagaatgcctgcatgatcaaaaa

SEQ ID NO: 76267 - DNA, 448 bp, Oryza sativa
  unsure (1)..(448): unsure at all n locations
agcttatttcttatgtggctctgttaagagaccctcttgtataaactgtttnttatacgggtctcttaacaaaccgttcgcgaaaatgcaggtcaacttttgtagaggctattggttactaacttactatccgcctgcaaattgtatggttcctcgaaaaaaaattgtttatatatcagtgatctaccaaccaccagctttgttagtttcccatctgggacaggttataggatatcttgacaaaaaaaaaaacaccaactaccatagggcttgtttccaccaaggatcctcacctagaattgctcaactaaatgaaattttcgcgtgtccctgcggaaaatctgcattataatgctaaaactgagttatgtggatttgtcattcatgtgattatagagtcgtacattgcctgttttgctggagnttataatcatgacgtttattacta

SEQ ID NO: 76268 - DNA, 474 bp, Oryza sativa
  unsure (1)..(474): unsure at all n locations
tgcaggaataaagcagaactnntgcttgctttctgataataatgatcaaagttatcatgcccctgatcttagattttttttttgaactcctgatcttgattggatattggtatttctctcccactggacaagtagcttttgtttattattgtcaggcgtgataatgtacagcatgatctntgccaagagattccactctgggacatcgaatcaatcggccatggcttgcgacagtgctcatgcgagcggatggtaaacaaattgaggcatgtgtttactagagaatttttaaaaataaatttcatgaaactataggtgttttaactaaactatccaaaattattaaattaaggcaccatatcacaaaaccacatatttaaagtacataanaagctatagatttaatattaaagttaacataaaattatatattttatagttgaactataaatgttatagttctgtgattaatat

SEQ ID NO: 76269 - DNA, 443 bp, Oryza sativa
  unsure (1)..(443): unsure at all n locations
gcttgggtactcaccagcaacacccagccatctaaatgaccttaatgtccaatatagtaatacacacattgcaaaatttcctataaactcaagtgctcagacgatgaagtaaactcactagcttacaacatttcaatctggcactaatttgataaaaaaaagaggggagggggggggatatgtaagaactatatggtcatggatatgcataactctttggacaaacctcacaactcctaaaggagggggatgagagctctaaatagcatcgttatatttctacccgttaagggaaaaacaataggtggcttgattaaaataaccataacatctcgctctcaagtctgttntcgaaatcttgaactctatgtaagcttaattcgacatctggtaacacaactaatccacacaaagtcatgttacactgtgattctttaaatagc

SEQ ID NO: 76270 - DNA, 464 bp, Oryza sativa
tattagagatacatcttaataatgattggaaaagatagatttggggccggtccattcagtgactctgggcccacttttgccaacatatgtatcacccttcttggttaaagaggaggttgaaacatataaaatctacaatgactaaaaactcttccagatgactaaaaactcttctagaaagaaccttgaacgacttatgtcctgataagcaaaggtctttctcggacctagccctgtcctaggacccgggctcacttttgcccttgtaagtcctacaatgaggagcgtggagaactacaagatatatatcttcagaatatgaggagaggtctgcctcggacctggccctatctcaggtcctggagtgaggagacctataagatatacatcttaagaatatatgcagaggtctgtcttggaccctgccctcgtctcgggtcctgggctcgcctatgcccttgtaa

SEQ ID NO: 76271 - DNA, 385 bp, Oryza sativa
  unsure (1)..(385): unsure at all n locations
tcataatattcctcccaataccaaanatcacatccaataccatcccgctacacacaattgaacaaaatgaaacctaattggcagagtaaacaaaaacatattgaatcaatctggactgacctggtgacttgggcaagtgtaaaagatgtgtncgtagttctcggacgtctttgccttacgccaaacgatcgtcttcaactcgcattgctggcattgaatcagagggagcgcaggcttccccatccgccgagacgacgccgatgcagtatatcccccatccatggcggcaacaaaaggacctactggggctgcgcgatttagatattgacggctagggattcggcagcggcaaggagcaaggatggagtattcgccagcgatcacc

SEQ ID NO: 76272 - DNA, 448 bp, Oryza sativa
  unsure (1)..(448): unsure at all n locations
ntacaatntacgtgcaatttaagcaattcatatatacttctctgtaaacttatcgntcatatgaatcataaagagttcaccatttgtatgtgacattacttttctgtttcacactttcacttaactaagtaaaccctcctttttgtatttgcattttcaattttatccatcacatctagcaacacctgggacactggatatcctaaatgtgtaagctgaatattgcatagaaaatgacattgcatttactagaaagtataaactagaaaggcagtacgaaagtatggatctatgtataaacaaacacatcattaccaaagtaaagcatagcactgcaggtcatgaacacattntaccagaaaaaagtgtagcaatgcagatgaacaaatcgaagaattattggagaaacctcagcatataacagaatacagaatcttcagatcaccct

SEQ ID NO: 76273 - DNA, 464 bp, Oryza sativa
  unsure (1)..(464): unsure at all n locations
agcttcattntcaaatcttcctctgaagtatatcttcaagcagcataatattgctgagaaatcaacctgagataacagcttggttgagcatatttcgttggacattatcctataatagagaacttttacggtgtttgcattccaaaaagggtaaagatccaacgctcctcaatcacaggtactatgttaaaggtatttaagtattgatatacgtatttaggtactaagggtaaaaatataattttgctagtagagtgaaaagggtagaattgtcctccaaattataataggtaccgcataggtacgctctacacggtatcagcgtatcttacacagtatcagcgtatcttttacgtggtttcttgaagaattaccgttgattcgagttaagccaccgtagtgttctttgatgttctctcttgcgtagatttctctagatttacattggattggtataatacatt

SEQ ID NO: 76274 - DNA, 451 bp, Oryza sativa
  unsure (1)..(451): unsure at all n locations
taagcttgccggtcatcttacggacgagcgagtgatttccgagagactagtctccgccctcggccgaactcacaaatggtgggtctcacgactccccgctattgaggatcttccctcgacagctggcgcgccaggtaagggcggttgcgcattccgagaggaagtcgctttcttccatcctaattttctggcgagagccgaggtcctcgtcaccgtcgccatggttctgcaactcctccctgtcgcgaaccttcgcggagggaggatcccactcgttcgggtgattcggctctctctccgccccctggcggagggaggccgcgacacgtctgggcacgccgccgtcttgactatggagacggcggttcgccccaaggcgcgcttcatgtagtaggcacccttctgcggcatcctcccggtaacccggngccggagactcctattcagcgct

SEQ ID NO: 76275 - DNA, 466 bp, Oryza sativa
  unsure (1)..(466): unsure at all n locations
gctttgaagcgagttcagttagggcatcgttgttccaccaagattgatagtaagatgaaggtgcaaaaaaataaggcgaacgaacacaccgcaaggtgttttgatcagcagaanaagacatacgaggtcacagagaggggtggtataacgcgtggtggtgttagattcggcgcaagagccttcaaagttgaaggtgaggggaactcatgttcttgtcaaaggccattgctctaccatatgccttgctcacatcttatacacgtttatctgatttatgcaattgatgaggaatctcccaaccgaatgccgtatcagttctcttcaagagccgttgtgaacacatgggcaagtcgctttgagccatacctcgaccccacacagtggccaccgtacgatggtgaagaatcttgtgctgacccacaattgaagattaaaacaagacggaagatgagatcgaaacgattca

SEQ ID NO: 76276 - DNA, 472 bp, Oryza sativa
  unsure (1)..(472): unsure at all n locations
tctcacgtctctntaaatccaaatctagcctctcatgtcggccggcattggaatgccagcaatggacccgaacatccgtcgccactctagcgacggctgcacgcaggcgcttctctcgctggcatgctttcacggatcggtgattctgagtgcctcccaagcctaaatggatggatggttgggtgttacagagcacactatgagaatgagaattcgagtggatagatcagctgaaagaaatgcagatgcatgaccggtctggctctctatttaattcgcccaaacatatatatggccctcaaccaaataatcatagctactacttcctcattatggcccagctgaaactatggcagaactgttttgctcagtgttaatttgggttcgtgcctggtcaattcgacattaatttctagtgcacgccatgaatcangccagaggagaaatcttgttcatcgttattaatattatt

SEQ ID NO: 76277 - DNA, 469 bp, Oryza sativa
  unsure (1)..(469): unsure at all n locations
agcttaagatgcagcttaagattaaaatcttcatgtggtacttacttaaaggggttgtgttaaccaaagacaatttagcaagactgaattggaatggtagtttaagatgttgttttttatgaaaaataagaatattcaacatctttttatggattgtcattatgcaaagtttatatggagagcaatgtagtatttttttggtctataccctcctagtaatatatcacatatttttaatggttggcttttgcgggtggacaagaaaatgagtaaacttatacttgtgggagagcaggaatgatttggtttttgacaaatcttcatctatcacatatatgcaggtaatcttcagggcaacatattagctccggtgttgggcccagctacaaaggtatgatgaagatggcgactntatgaangttgcatatcgtaagcttgagacgacaattatgcaacttttgccattatg

SEQ ID NO: 76278 - DNA, 468 bp, Oryza sativa
  unsure (1)..(468): unsure at all n locations
tctcgccgaagatttcaaataccgctacttgtccaacccgagacccctaattccccgccgcgaaatccctaaaccctagccggcgccgccgcccccgccccggcatcggcgacgactccgacctccagaaggacctggacgagccgcgccgctcctgcatcctctccgggaacgaccccgacgccgcggtcgcgcaggtctccgccagcctcgccgccggcacatcangggcggtgggcggcgaagaatggctttgtccgatgatgacgaggaggaggaggacgatggctttggcgctcgtccgtagcatccgtgagaatctcctcaacaaggcctcttgccctcctcacccgatctgcgtctggccgccctccgacttggaggaggacgacgacaacgacctcgagacgctccgtgcgatacagcacccacttctcgcactaccattccggtgagtgaattctatct

SEQ ID NO: 76279 - DNA, 417 bp, Oryza sativa
  unsure (1)..(417): unsure at all n locations
agcttgcgagtctangactatcggtttggctataaagtcaacttcctcaattctaaggttaacttccgggcatatttgagttgcccttatattcctccaaggggaatgtactatcattggtacacgtaaattttgggttttccaaccatttcttttcacaaaagcttgtgatatgaaagaatgggaagctcctgaatcaaatagaactattgcgggtacggagttgacagagaacatacccatcacgacgtctggagtgtcctgagcggtctcagcttgaatgtggttcacccggcctcgaccaaagttgttggaagcacgagaaccttgtccacttgcctgagagctatgacgagattgagctgccgctggagtaggaagtctggcagtgctgccattagcatgccctgagttggt

SEQ ID NO: 76280 - DNA, 467 bp, Oryza sativa
cgagagaatatgagagaactttacttgaggtgtgtagagaaaatgagaagaggagctccttaaaaggctaccaatgacggttgtggcaattggaatggtcggaattgccctccaaccatcattggggagtgatccacaccgtacatccaaaccctgcattgaacggagccacggtgggttcggccgaaccatgggctgggccggcctagcccaaattcggcaggtggcctcctctattgctcctcttcgcaaacttgtgaatattggcccaattcgtcgtgtcaattctgagttcttggcccattcatgcataagtgtaacgccccgattgtcgttcgggaataaaaatcaattaataatacatttcctagaaattaataaaaagttaagcaatttattcgagtgaattaatgggagaaataaaatattcccttataaatcattggcccggaatatattgcaatatt

SEQ ID NO: 76281 - DNA, 456 bp, Oryza sativa
  unsure (1)..(456): unsure at all n locations
agctnggcgaagcacggtgaagggctaagcctttcgaaccatggcgaagngcattgaaacaaggcaaaggcactaattctagaggctgcgtagccgcggtccaaatctagcccagtcggctatcctgctagaaccccaaatgcacatttttctggatatgtttcctcctggtcattgatcattgtgggctggttctccctggtcttgatgactangtcatccacatgcactaccgcaatgtaccctagctgcggatgcaaggtatactgacaccacgtgctacgtacatggagccggcattntttttcatagcagtaccttcctggaggggttacaaatgaagggtttagtggctgacatgtggtggcttcctgccgtggagggcagcaagcatgatgatgtttctacaataatttacttgtacttactttaaaggttaaaaatatccacagaaaa

SEQ ID NO: 76282 - DNA, 445 bp, Oryza sativa
  unsure (1)..(445): unsure at all n locations
tgagggcatcatttgagtccccatattgtgcatgcccttcgatcatgacagtccaggtgacaacattgcgttcctctagaggtatatcatcaaatatggagcgtgcagctttgaagcttctgcactttgagtacatatctattagcgcgttgtacaccataagatcctcatcctcaccaccaaaatcattatccaaggttagaagacagttctttagagagtaggcatgaatttccgtaccctgagaaaatgctcccaaagaagcgcaggcagacaacacagagatgattgtgacacaatttggcaaggacccagaaaatatcatttgacggaataaattgagtgcttcatggctgcatcccctctgagaatagcctgcaattacagcagtccatgttaccacatctaatgggatattntccttgcgcatgttcttgaaaagctc

SEQ ID NO: 76283 - DNA, 480 bp, Oryza sativa
cgccggatcttaagcacctgggctgcagcttgttacaaaaggtggcagccatatcatatgaagttcgggattcctcagagagctatttctcaacatttggaactaggggcgctaggcaaaatccgaagaagaaatctcttgatactctcatcaaaaggctcagagaagcccgctagaggtgctagtcctctcctctgcaggaagataatatatgttctttgcctttcaccttctcatgttttcatggaatttagcctgcatttggtgtgcattattcatattaaaatcaccatttttcaatatactgtaattttgctaatgttagagtgcctgcttcatatgtgttgatattgcagggttaattctttaactcatttactgtataatcaagatatattattatcattctttacctttcattgttcataagaaccatgttgcatcaatgagatgaagtgccgctatgatcaatatgcatat

SEQ ID NO: 76284 - DNA, 286 bp, Oryza sativa
  unsure (1)..(286): unsure at all n locations
tctaaatgggactcanatttaaaccaaaacttataacaccttatgtctgctgggttttaataaaccaacaataatagaataagtatcaatttttaaaaatagacataaataaataaaccataggtgctagtttttaaatttagccaataaaaaattggagtagcgatgtgggcgaagaaaaaatcgggggccaccagacctggccacccactacccctcagcatgtagagccgcatcgttctagttactgtaacgttgcattaccaggcaggtctcgtcctcagct

SEQ ID NO: 76285 - DNA, 461 bp, Oryza sativa
  unsure (1)..(461): unsure at all n locations
agcttgaaacactaatntgattatttttctctagttaaaaaggatttttaattgtaaaccttaggagtctaactgtgacctataattattgcttagcatgtaggttctggtcttctggacatataaaaatttgatgtaaccaagtttgttaattaattaaacaacactttcattatattatgcgtgtgtaacttgcataacaatctagcggttaaagttatgtctttgcaggctttgagaagtccaaaacgacaatcttttctaaattactatagggagtatgatgccaaagcttttttaaaaaaaaaaaccctctcggcctctctcatagttgttctgagtttgaatcgataaccttatgtttaagaaaaaaagaatcgataaccttagaacagaatcctgccataattaatgggcagagaactggtcttcttgattaggccgatatcttagcacacctg

SEQ ID NO: 76286 - DNA, 466 bp, Oryza sativa
  unsure (1)..(466): unsure at all n locations
tgccaacagcaatcgggttcgctntattccttaggacaagatgaccaggcatcagttccgtcggtcgaacttttttgttgtaagttgccgaagtgcttgtggcatacttgcgcatgtgctcaagtgcttcgactcttaccccctccaagagttcgagcgacacttcgcgcccctcttcgcgtctagagaacatcacccttggtgagttagcccctagctctgctggggtcattgcttcgtcgccataaaaaagcatgaacgggctaaacttggttggtcttgtgggggtagtccgaagggcccagagaacagatagcatttcctctggccatttgcccttcgctgccccctcgagccttttctttagtgcttctaggatcttaccatttgtacgttcggccgccccatttgactgcgggtgcgcgaaccgacgcgaacctgattccaggttcagtccttcgcacat

SEQ ID NO: 76287 - DNA, 410 bp, Oryza sativa
  unsure (1)..(410): unsure at all n locations
agcgactgagcatgcaactgattccatcgcttaataatattatttatgacgccatngctgaacgagaaagattatatgccgctgccatataactctatcatataataatggatactcttttctattcctcttctacaatgagagcgctggcacagtgtttagcttatcatgctaactccatctattccctgaaactcttttaatggataaactccattccatttgcttccctcttgtaggggagctgaaggtaacaaaagcatatgattaatgggccaataagatctctcagattgaacctctcaccaacccattatagagaagagtgaagtaagctctcattctcttatcttccaagtaatccgcctttcgagatgttgtctaccatcagctgctcactactgcatttg

SEQ ID NO: 76288 - DNA, 444 bp, Oryza sativa
  unsure (1)..(444): unsure at all n locations
tctnttcgaataggaagaggaactaataacccaggtaatttacaattctcatgtntggctggttggcacacttggcactgctgaacaaagttctctactgctgctttcaacccatgccaagcaaagagtttctttaatctgtgataagttgccataatcccggagtgccccccaataggaatagactgaaaagttgtgataattttggtttgcaacctagcatttgctccaatccacactttaaccatataacctaatcataccatcagttagggaaaacccctgattattctgctttaccattgctaattcaattaatcattgttgagctttggggtcaaccacatatgaattcagtactttctaaatccaaacaggttgaactactgataatactgcaagaataacctgatgaggtctgcgggacgatgcatgtgccactat

SEQ ID NO: 76289 - DNA, 461 bp, Oryza sativa
tggcctagccatggcgaaagggcccacgggcgcatagtgtcctcttgtgccttctccgcccagcgcccgtactgggtgatgtacatatgcttcgctaaatgcccttcgccatatacccattgcccatgtggtcattcgaactgcgaagctcggagccaggcccttgatctgtccccacatgcttatgcgcatagccttggtcgtgtgccttcacctttgtcgacaatgacgcctctggcttgatccttcattgcgtggacggaagttacgcccggaaattcactattaatttccgaactaatttgtgcataaaatcctctttcaggaatcatgcgaggtacacaaactgacaatttaatatactcatccatcatcataagtacgttacatacttacaaagaatagaagacagcagcggaattaacggtctatcgatggcttcagctcactcccacaggcag

SEQ ID NO: 76290 - DNA, 390 bp, Oryza sativa
  unsure (1)..(390): unsure at all n locations
gcttggtggtcatctaccttttctggggaaccatggagctgtctttgacatatgctaatctggaattatatttaaagaatcaccaagatgttttatacttcttgagcctttgttttcttaagaaattctgttgggacttggtagtttgaaaatttacaatgctaaggcattctaaacatcagcatatcatttttntgtatatatatgccaatcttctggagggtacataccaccaatttattcatttttactacactcaattttgttatcttgcttgaaatccttattacaatcgatatgtacccttgcttatcattataggggcatgaagattcttggttatctctatcctgctatcctacccatgtgcggtccctgaataatctgtga

SEQ ID NO: 76291 - DNA, 464 bp, Oryza sativa
  unsure (1)..(464): unsure at all n locations
tagccatcccgctccacaccgncatcgtnttgtagtgagagaaattgccggagagagaacacaagctggagggagatgggaagaaaggggagagaggtgaaagaagactgggttgctgaaatatgggtcttatactgactcaatcatcacgttagctaaaaatgaagactatattgcctttagccaaaattataagaaaaaggatatcttatatntagtattgtctcatgataaaatttgaactggacgtcaagacgaggaacctggagtgaacttattacactcaagaggaatgcttcaagaaacccatgaagcggaaccgcagattggccggagcggccttgctggcccaaacgctcttcaccgtcgacaacctcgtgcggctaacctccaacttgccgcgagcaacactcgcatcggtccggtccccgcttcgcaagccccaaagcttcgcgggcaccgat

SEQ ID NO: 76292 - DNA, 356 bp, Oryza sativa
  unsure (1)..(356): unsure at all n locations
gcttgaaacaacatcgacttttctcttctcttcacttttctcttggtcttcctcacccacttttgcacaaaaatcaaaccttgtccacagacataaggcagacacaaaagttaacatagcatcccagttaacaccaaataaatcagtagatgtacagcatagatttgtgctacattcaaaagacacgttagcagacatcgcatatcaaagcaatatgcataaccgctacaacacatagggcattcaactttacgacacttcataaaggcaagccaatgagaaaaaaaataaagccacgtcttaagagtncaacaaactaatggaataactatttacataaacagggttagttgatg

SEQ ID NO: 76293 - DNA, 471 bp, Oryza sativa
  unsure (1)..(471): unsure at all n locations
ttttcatgaaatatgttctttttgtccattatgtggaagtccatttatgatatttccatctgattgatggtgctatgtgctgaccaaattcttccaaattttcttccagcaggaagcacacaaacatagcaataattggctgccactgcgtggactattctacttcttgcaattttaggttacaacgaatttatgcttcttctaaggtaatcatctcaatgaagtagcttgcttatccttgtaaaagataagattctctgttgcattaatgcataaactgagaaatcccaaacttgacacttaacatatataactgctaaccatttttatgaactcctggacacgaaccctatgtatcttctggggctcttcgttgtcttcgnggcatcctatgctgcagtggtgcaatataacatcacagcctattatcgccatggtacaataagaatatacacatcatcgttcacataa

SEQ ID NO: 76294 - DNA, 366 bp, Oryza sativa
ccacagtactcagcaggccacaccggagatgcacaattaatgcaaacgagttcatagggataatattataggggttaacatttgcactcaaccgcatttaatagtcacttaattgcccaaagccattttgtaaagacgatcatagaactacacagttttattaacaaggccgtgaaccctcatcaacctgtcttaacccaaaggctaccatgattcaaaccgaactggctacccgaccctgggttccagctcgtcccaagccaacccaagccaaccatttcatattttaatttgtgagccaattttaagaataaaacactgacttgggtacattgctatgcttgcccatattcgagggctcggcta

SEQ ID NO: 76295 - DNA, 456 bp, Oryza sativa
  unsure (1)..(456): unsure at all n locations
aaggaccatacctcatcaagcgcaagtccatgacgggatcttttcgcctagcgacactcgacagcgaggagttcgaccattcctggaacgccgcctccctcgagcgcttctatgtctagaatgggtggcacccaaatcgccaacttgtgaaaatgtacatactatcatgtaagcctttcggcactatgtaagcctttcggcaagaaaaaaaaaagaggaaaaaagagaagagaaaaagaaaaaaaactggatgtagggctattatccaccatggaggcccgaaccagtataaaatctctgtgtcctccgccttctttntatttcttttcgtgtgattgataatttgtggaaaaaccccaaggcaaatgcctgatcagcgaanaaggctagggggtgaaacgaatcggccaaagcattgctccccgaacgttgaaaccacaacagcttgtctcggaa

SEQ ID NO: 76296 - DNA, 468 bp, Oryza sativa
  unsure (1)..(468): unsure at all n locations
agcttgagcatngcggtggatgagttgctcttgctccgaagtgagctccatatcatcatggggtacatcaacacctgtacaaacaactttccaaatacttggatgcagagagattagattcaacttcatcttgtgcttccaagcggcgtaatgtgtcccatcaaattgaggagcatgcccggaaggcacggagacaaagttgtgagagggaatggtaagtttgctgtaatcaaaaggtatagtagctcccttggttgatggagttcccttgctgctcgctccatcttcatttccattttccccattcttttcccctaagtccgacattgtggatcactcaaagcggtgaagcttgaatcaagagcaccttgctctgataccaattaaacgcgctgatgaagcctagagggggggtggtgaataggttgtctctgaacacttaanaacatatcgcagcggttaaattca

SEQ ID NO: 76297 - DNA, 466 bp, Oryza sativa
  unsure (1)..(466): unsure at all n locations
tgtatcgctggggggcgacatangcgaagaagatgttgataacatcctagaggtgatcaagagaaacattgatatcttcgcctgcggccctgatgagatgggaggtgtttcgacagatctcatcatgcatcacccgacagtcaagccggataccaagccaaggaacagaagctacgcaagatgtcagttgatcaccaagaagcagcaaaagccgaagtccaaaagttgctcaaggctagggtcattcaagagatcgaccaccctgaatggctggcgaatccggtaatggtgcggaaatcaaacggcaaatggcgcatgtgtgttgatttcacagacctaaacaaggcatgtccgaaggatgatttccccttgccacagatcgaccaactcgtggactcgacagctggctgcgaactcatgagctttttggatgcgtactccggctaccaccagatccacatgaacc

SEQ ID NO: 76298 - DNA, 466 bp, Oryza sativa
agctttctcggtttacgtgctatgctaatattcttctctcttgaactcttggtcttggtgaaaccaatgaagtcttacggcctaacatatttacaaacgaaaagtaattcgtgaataaaatatttatatacgtgttcttagcaatttaaaagcaaagactgaaaaatatttcgataaaaaaccttaaaatatgattcaaaattaacgttgaaatttaagttgtgaccaataagtataaggataagataagtgaaaagacgaggccgttaatcacaaaaagaagaagattaaaaaaagacatactgggcctcctctttcggcccatcattacagcccataataaatatcacaaaacccaagggtgctactctgaaaaccgccctcctcctccttcctgcctaagcaagacaacaaacacctttcctttcctgtccttggtcaagcacacacttctcctctccgtgtc

SEQ ID NO: 76299 - DNA, 468 bp, Oryza sativa
  unsure (1)..(468): unsure at all n locations
tgttaactgggtgtcatatatgacaaagatgacagatcaatacatggagtaaagntgttatccacattagaggcctaccatgtataaaaatcattattttttaatatattattaagtgttcgtgtataatccgccaatagatttgaattaggttctctccaaattctcattttgtcgataaatcaaaataaaatgacatatcaaaatatagaattgtatcctctctctcaaaatcgtaagaggtgcatatatatatatatatatagtgagagggcatgtaatgatcatgcctgggtttctgaaggtgaataactaacaaaactgtgagtgcagccttgtctgctgtgaaataaaaatggcatctaanaacgcaagagcagacgctggattcgactctgcggcatccagatcgatccanatctataaatgcatcaacagacgtacagcctcatggcaccatccgcatga

SEQ ID NO: 76300 - DNA, 441 bp, Oryza sativa
  unsure (1)..(441): unsure at all n locations
agcttcactgcattntccttgatatgcattaatttgttcaatacataatcaaacaaaattaaagaacactagtcaaataatagccaattaatttcctcctcacctactgttgacctgattacctgaaggaaacatagaaaatgttgcatttcttgcaaacaaagagtaaaagtttgcacttgtacatgcacaatgagcttagctgcaaacttgaataagggggcactgaaaataggattattcattattcataaattatatctccccttccttcattntttcctgctccatataagaatagttgaacgagcacatatactaaaagctaacagagaaagagggggggggaggtgaaagagtcatgagggctatgccattgggttgcaatggtaggcttatgaggcatcgagaattcttctattactcgtcgaaattacctct

SEQ ID NO: 76301 - DNA, 484 bp, Oryza sativa
  unsure (1)..(484): unsure at all n locations
acaagaatactaagcttattaaacgatcctagcacatctgtgacccattcgctcattctatccaaaactaaactgaaacaacagccgccttctgcgcaggtcgtacatgccaaatcacagnggtcaattattcatggtgggcacaataagcaaaaccaaacatgaaaacatattctaaagaagttagagcgccacttgccatgtagcaacattgagttgatctgcagcagtactagactgaccgagattaccggatgaactcaaagagccaagagaccctgcaaatgataccaccgtgaacatgcagtatatacactaccaataacaaaataacagttcttagatcttatttcctcatccgttcgcttatatacttattataagtgaaatggactggtagcgattacaatatcatctatgggtaaaaaaatataaatacgtgttcttactggatttaaacaaaatgctggaaaatanaccatga

SEQ ID NO: 76302 - DNA, 252 bp, Oryza sativa
  unsure (1)..(252): unsure at all n locations
ctgctctatataaatatatatatagtctccgcctgaagagaagataaagtgaagtgaagattangggtttgttctggttcccaaccgtcgcctgtggtgttgggtgttagacccgtggttccgctgctggttgttgtgttggtgttcgcctcgtccgtgtcgtccgttgtattctcgggctgtctgagctgcaacctaagttaatgtaaataagtcctctatttantttaaggattgatatgattcatattt

SEQ ID NO: 76303 - DNA, 468 bp, Oryza sativa
  unsure (1)..(468): unsure at all n locations
tgcaacagcaagagcagnggttgacttcttccaatatttgtcaaacttagtattcatagatgctgccatgttcttaaccatggtatcattgcctctactccaagacgtaagcaacagcttaatttcacaaaatcctctgtaaaataagtttgctgtaggatataaaataccagagaatagattggtgagatcactgaattttttcaggcacatacatactttacttgctttttcccattgttcagggagagggcatatgctctcatacttgcaacattccttactcgtaagcctctgaagagctttcttataatacaaagcatccctcaacatcatataagttgcattccatcttgtacaacaatcggttgagagtcctctggttgtgtccaattcacactcagaagcacacttcaagaactcctcccactgcaccgtntgagtctttacagatatcacanacaatct

SEQ ID NO: 76304 - DNA, 466 bp, Oryza sativa
agctgctttgccgcccaggagtgcctcttcatttgctagttctggcgcccaagagtgcctcttcatatgctagaggtcatgaaagagccatccatttcattccatttcatcaacctacatatccaaccaaacactacacacatccaatccaaatgatcagagatctaaatttgctactggaagaggaaggagaggaaggagatcaaggggctttacctgatctcaatgaagaaattgatatggaagaagatggaagacatgttgttatccttggagataaccttcttggagttgatggccaggaacatggaggttttcttgatctcaacttgcatccttttgatctcaacatggtggctacagaagaagaagaaatgcagcaaggtaagatttcaatacttttggagaagcactggtgctatggttttataaaaccaataagaattcaataactgaagatctacct

SEQ ID NO: 76305 - DNA, 449 bp, Oryza sativa
  unsure (1)..(449): unsure at all n locations
tcgccatgaccatgagagtagcttntgcctttcaattcttagccataggagcgccggagaccggagtcgcggagctcgcgtgccctcgtttctccttccccagcggaaccacacgtcacatgcgtgcgcggtgcgccggtgggcgtgctctgcgggctgacggggagaaagacagctgccgcttcgcgaattgaccgattgagttttgttggattagtcaacttttacgcttattccaccatgcatgcacgtagtacacgatcatcagttaacgctaggcaccggcgtatagtacaactggatacgccctgcgcgtatacgtttatggctccgttggtgactttctgatcacgagtttcatttgaaaaaaaaaaaacacctaacgacatctatcttgcgtccggtccttcgtacaagaattcttttanttttggtcgcgataggtcacg

SEQ ID NO: 76306 - DNA, 466 bp, Oryza sativa
  unsure (1)..(466): unsure at all n locations
tgcacctcagtatctccgggacctatcttcctcagggcaactacctttaattctattcaccagaactatgttcaagattcacgattcccaactgcaggtatagattcttgaatggcctgagcaaatgttgcaatcttgtatgtgaaaaacccaacaagcatgggtatcaattccaggtgcatgaagccataatctggaactaaaatcctgcatcagaccagcaagcacaggtatacatgtaagaaaaccatacgttctactatntgaatattcaaacatcaaaagtttaataaaatttcatctacttactcattccatcggttatacatcatcacaagtgccactggaataagcagtcttggttgggcagcagcactcctgtaagcatgcaagaataaaataagatgcatgtgagcatattttacaagttgcctaacatttgctgaacatcggtcacattccgttg

SEQ ID NO: 76307 - DNA, 458 bp, Oryza sativa
  unsure (1)..(458): unsure at all n locations
tcgccgttgggctcatctcctcagctgctatgaaagccatcaaactgaacaattctccaataagaaatcataggatgtttgatatcaaagttgtttttaacacacattgagtggttttcaagcagggaccatctcactgaatatatatgttggatttgcagccaaaaacaggtcaacaggattaacaattaagggcatcaaagacctctactggtgatttcttcaggtcaacagcaaacctcttaagggcttattcggttcacaggattttcaaatcacaggaataggaaaaacgtangaataatataggaatgcacgtgcgaaacaaaggattggaacacaggaatttttcctacactgagctaaataaaagaggatagagtggatgtnttcattcctatagaattagtacaatttggaggattnttggaggattggcatagtgttcctatggaaaa

SEQ ID NO: 76308 - DNA, 270 bp, Oryza sativa
  unsure (1)..(270): unsure at all n locations
acttaaactcagctgtgctgggggcttctcattgnttatgaatctctcttcatttggatcaaaaatgttgcgaactaccaaatntaggaatattcttcagccgtggcacatgttttactatatctatcaacaaattatacaaactttagatgtcttatagcaaaatttgcgttcaaggaatattttgaagctataacgcaaatcattcaagtatgcaactaggcaagatgggctataagaataatagatgtgcttgctatactaagttat

SEQ ID NO: 76309 - DNA, 396 bp, Oryza sativa
  unsure (1)..(396): unsure at all n locations
ggatccttaagcacctgagctgcagctagcgtgcgcggcaaagctttggttgcgagaattgatgatgctgagctccggaagaagcttactgatggtgttgaaatctatgatttgaaggggatgcttggcaaggtcacgattgattccgatgctgtatcttgtttgcggggtgtgtacaactccctgctcaagttcaaggatatccttgcatgggaaacaactgttgccatggcggngatccaaatggatagttcaattgagaagccacaacttgtgaggagaatgatgcgggcagttcaactgaaaatctcgatgctagtggagagaaaccaaaaggtgacaagaagagcaagaagaagaaaactttggggaagggtacttctgctgtactgatgt

SEQ ID NO: 76310 - DNA, 471 bp, Oryza sativa
tcttcttgaacacccacttgcaccccacaggtttacacccatatggtcgctctgtcacctcccaagtcccggtagcgataatggaatccatttcactacggacagccttcttccagtagtctgcatcaggagatgcatatgcttctgaaattgacttatgagtgtcatccacgaggtacacagcgaaaccattactcaaaacctaattgctccatgatctgacaatgtggtgctacagtaaacatttgctaatgacggattattaggcttaataaattcggctcacagtttacaagaggatatcgtgagcaattctcttgcgtcagctttggtaacccctcctgtcagtgccacattcatggctgactcaccaatcattccatgcacacctgcacgtttcctcataaggcgcaaaaaacggtgaagtactacgacgaatctggcaatcagacaagtcatctctctcggact

SEQ ID NO: 76311 - DNA, 498 bp, Oryza sativa
  unsure (1)..(498): unsure at all n locations
agacactagacacaactcaaagcttccagaacactgctntcctcatccgaagttgattgatgcaatctgtatcactcccattgtacaaatcatctaatcttgtttttttaccagatccctatctaccaatggaccatatttccttagacgtcgtcttttttttacatggcgccgccaccgaataattgcaaacacaacagctaaaacacccaatgttctagtctgttgctggacaatatactgatgagttggatctagatccattgttctgaccatatatgacaaataaacaagacataggtgaaagaaaatacacatcatatacatatataaagtaatattacagtacaggctcacattgatttattctaacaatcacgctttttccagatttggtgaaaaaagaaataacaggctaacaagagagggaaaatgttctataaaaatcaagagaggggaacgcaacanaaaatagcttgagactgtgttctcaccttg

SEQ ID NO: 76312 - DNA, 351 bp, Oryza sativa
gcatcacatgtattttaaacttagaaacaaaaagcaaaggacgtttgctctgaaaaaaaaatctgaagcaaaggatgttacgaaatagaaaacaaggagagagctatcacgccgtgtgccgtcgtactatcagatccacttgcgtaataacctatgattaaccccaccattagcaccatttcgccgcatacaagcagctgctaaaagttgggttagccgcacgcactacaccacaccaccgctcatgcatgcatgcccctacttgcaccatatatattattaactatattgatggactatctcctctaatcaaagtgaaaaatatgtactccctttattttatatatgtac

SEQ ID NO: 76313 - DNA, 415 bp, Oryza sativa
  unsure (1)..(415): unsure at all n locations
tgagatagagggatcgtctgctcgcgttgatgtatgtggctccactngtgttaaggaagaggctccttgttggggcttcctaggacgtacgtccccaagagccaatcttttgattgcttcgctcggatacttgagagccattaattntgtcaaatgtcacatcacgcgcaatctcaacaatactagagggtttgttgaaaacgcggtatgcgcattcatttgacccatacccaagcaagaatccctcatccactttaggagcgaacttagaggatctagccttcttattaagaatgtaacacttactaccgaaaacacgaaagtaagagacatttggtttattaccggtaagaagctcatagggagtcttcttaagaaggcggtgaagataaaggcagttgatggtatggcatgc

SEQ ID NO: 76314 - DNA, 447 bp, Oryza sativa
ttggtgtaactaacttaaagagacataacaaaagttaattgtaaatagcaagctgatggtactatcagaatcaactcttgactacaatttggtggaaccatggaaaggatgttctcaataagttgcaattttgaagcgcacaaaaataataggcagttattattattgtctggtctatggatttcgtttgtgccaaagcataaacatcgacaactgattagtgagcacataaagaacaaaagatgtttttttcctgaaaatttcagtaacgcggaagacttataaatgttttaaaatccaaatgataattataagacaccgcatgttttcttatgaaacacactagttcaactttacacactgaatccaaaggatgtacacaagtaaaatcgtgtattcttttggatttgtttgcaaccacaatggtgtcatttaacactgtttttt

SEQ ID NO: 76315 - DNA, 233 bp, Oryza sativa
  unsure (1)..(233): unsure at all n locations
tgaactcgcatgacctccgtgcgaggaaggcgtangaggtatcatgaggggtagtcgtcggcgagcccgtctaagctcgagctctcttgacctccgtgtgagggaagcaaaggcgaccagagagcctgttccgttcgagaaggagagggaggcaaggggccggtgagctcgcactcctgtgcggtgcacatgttgcgccattcctcttcgcagcagcgcacgagcttggcctt

SEQ ID NO: 76316 - DNA, 393 bp, Oryza sativa
tctctccataaatactctacataaatgagacctctaatgcagtagtatagactaaggccttatttagatcacctgttaaaatttttcacccaatcacatcgaatatttggacacatgaatgcatggagtattaaatataaacgaaaaaatgactaattacacagattgcgtgtaaattgcgagacgaatcttttaaacattatgcatctatgcaagatgggctagaagaagaagagatgtgcttgcaaaccaaagccagcgaactacaccgactgaaaaatatatttaagaaaataaaacgagagcaattctcttgcgtcagctttggtaacccctcctgttcagtgccacattcatggctaactcaccaatcatttcatgcaaacctgcacg

SEQ ID NO: 76317 - DNA, 463 bp, Oryza sativa
  unsure (1)..(463): unsure at all n locations
agctngccagcacaaggaatttgtcaaaagggcggggggattagctgacgtggaggcgccctattggtccggacgcgtcactggcgtgccactggacaaagcagccgcctccctcggtaaaagcagctaattattgccgagtcctcgggtgaaaacaccgaggaattcatcaaatttttttctcgcatcaatcgcggccattcccacaggaggagggagcagtaccgatcatgcaaaggcgaatcttgccatggcggcaatggaaggaatctttttgggtttttttttccctttttgttgggtgttttactgcttgcttgccggcgtattgcctctcaaaatttgcacattttttctcactgtccccaaatgtttccagataatccaaactgtaaaaaaaagtactacaaaatcagggggacgcgcgtgaaaaaagctggaataatagcagtagtaccgacgt

SEQ ID NO: 76318 - DNA, 390 bp, Oryza sativa
  unsure (1)..(390): unsure at all n locations
gggtcatgcattgcattgggctatgtttcatgtttcaagggaactacttactgcttcaacggatggcagtatattgcattctttgtccagagcttccccttgatattgttatattgtcgcctttacatcacataagttgtgataccgttgctttttgtgtgtgtgtgtgtgtgtgtacaaaatctttctaccaatctctgcttgcaagttgcattgttcctgtggtgttntactaacttattattcagttntaccttagatgttcagtagttatagaaatgctgttgtcttggaggaggtactagctaaatggttgtgcttagtcaaggactcaaggatcatctatttcatacttggttcttactctattttataggacctaatattggg

SEQ ID NO: 76319 - DNA, 384 bp, Oryza sativa
agcttcttcagcgacgcactggtggaagatgacttgccgagggtgattgctgattcaagatcgccggagaaagggcctaagttgatgaacgcttacaggtggaatgttttcaggtggaatgttttcaacacggttggcagacttcaaaatggatctccaaaatttctttaaataggcgcactaccgacggtgcgaattccaaggacagagagagatgcccgccggaaatttctgggtccgctatgcgcggcggttttttggacttcaatttaaaattcgctcatgaccgttgggctttgaatggcatgctcggctacggcctgtcttcgcggtcctcgcttcaggaatgacaacagtctcgacacccgaagtcgtgaatggtta

SEQ ID NO: 76320 - DNA, 459 bp, Oryza sativa
  unsure (1)..(459): unsure at all n locations
tctctcagctntagaatcttctgatgctatggatgcagatcaagtttcttctcaggtatgcgttaatccagatcacaccaatgacagtaatactgagaatgctggggttgagtcaaatgcaaagcaggatctgttgtcttcttggattgaagccattgtatcagaggctaaaaaggaacacccaccatgcaagtccactccgctcactgttggcttgccagataagttattagaaccaaaggacagcgacaggaaaacattactggaaacagtggtgccttctgcagtaaaatctcctcagataaattatgcaagctcaacactccaaaaggtagctcctaaacaagtaacattgcctagttcatcccgagaacccactcgagcaaatcaaaatgcaaggcacaggacttggcatcgtggcaacatagcatcttctagttcatctttgcatgcttcaca

SEQ ID NO: 76321 - DNA, 391 bp, Oryza sativa
  unsure (1)..(391): unsure at all n locations
agctngcccncaggaagcgaagggttcctacttcgtctgactccgacgctgacgacgaggatgatgccgaagaacgtgacggcgaggaggaaggagatgaagaggaggaggtggaggctgtggctgataaggccgcgagcgaggcggtcgaagactgcgtcgacacccccggctacactcctaccccaagtcccggtcacaacgagaccggggtggagtcgaacagctccccccttcatcggaaggatttggaaggggcgaaggccctatttgcgttctcttcaagtgcagcggcgaagggaggtcctggcaaaaaggtggctaagaagaaaggactcgtcgatgtcgctcgcgtttttagcgacgacgagtccttcgacgggactctgac

SEQ ID NO: 76322 - DNA, 465 bp, Oryza sativa
cttattcaaaccagctatgctatgttgaattgatatgccgaaaacctatattctaaagaataattgtagctaaagatttaacttatcactacttaaaaaaacacgtagagatcaaaattataggtgccggaaaagctaaaaccaacacctcctatagtgcttttctctccccatgagctgaaaacatataaaaccggcacccttaagcgactataggtgctggttctaaagaaaaaaaatgcacctatactacatatatgtgcttttttttctaaaacaagataactttaatatattataagtgtcggttagttaaaaaccgacatgatcttttaaaaaatcgtcacctataccaaaccgagccgagcacgggccttatccacttcgcgcgcatctgcggccctatctcttctctccctctctcttcctctttctctctctctctcgcctctctttggccctctc

SEQ ID NO: 76323 - DNA, 337 bp, Oryza sativa
tgcatgccagcttgagtatgagaacaactatttcccttatctactgattagccagaagagatatggtggtttgtactggacaaatccttagaaaattgaccaaatggacacgaaaggtatgttctttcgtcctgtcttagatatcatcttacacttcttgcgttaacatgaatctaactttgtttattggtattgaaacaggtaaacaggaccactgtttattagtaagaacccgggtactgagtgccttcataaaatactaatggacagagatgtttctggtgccattcaatcatttaagaacaccattcttgatctactaatgagccgcgtagac

SEQ ID NO: 76324 - DNA, 404 bp, Oryza sativa
ctttgtgagaagaaatgggtggaaaacccaaaatttgcgtgtaccaatgatagtacattcccctgtgaggaatataagggcaactcacatatgcccggaagttaaccttagaattgaggaagttgacttcctagccaaaccgatagtcctagactcgcaaagcttggacatcattctagggatggattggttggctaagcacaaaggacagatagattgtgccgaaaagtccatcaccttgcaaggacctggaggaaagcaagtccgctttacccctaacacccctaccgtaagtcggtctattctaacctgtctacaagtcacctccttggagtcggtgcccatagtctgtgaatatcccgacgtattctcagaagaattaacgagtatgccaccggaccgag

SEQ ID NO: 76325 - DNA, 464 bp, Oryza sativa
  unsure (1)..(464): unsure at all n locations
tcctcaccatagaaaaactgagttgcccatctacatcatcagttactttaattgtcaatgacctctttgggaagcatgttcactggcacaaactaaacctaatatttccatcaacaaataatccaacatgagacctatcactcgcgtaaataaagagagaacctatcatgccacattgccacatcaattaacaaatttctccaattagtaaacaaccgaaccaagttaacacccccaaagcgtcacattaaccaatcgactgacaaaagatcctgaagctcaccaatcaccatcattcacttattcaagttgcacaaccgttactctatttactttctggaccaatgccataagaagaggctgtcaaatntctttgatgaggctcatgccaaaacatgtaggttatcaaattgcccctattgaccacctaatatgtcttagtacaacaatgaagtaggacaatc

SEQ ID NO: 76326 - DNA, 453 bp, Oryza sativa
  unsure (1)..(453): unsure at all n locations
tggatcaacctggagagtgccaaggctgaagcacagtccagaatgctagaggtaaaagctaaataatttcatctctgttcatattgcaaagntcaattatggcatcagaaatagctattttgcttctggtccaagattacactttaagaacaatgtagatgcaatgataaaagtagccaaaacccaaaaggtgtagtagtgaattcagaagggtatatgtgtgatcattttgagccctgtgcatattgcaaagtaaaattattgcatcagaattcagaaacagaaacatttttttttcttccagtccaaaattacacttttagatcattgtagatgcaatgatatgagttgacaatatttgccaaaaggtgtagtggtgacttcacttcactagttcactagggtagatgtgtgatcattttgagccctgtgatcttttccttgtggattcac

SEQ ID NO: 76327 - DNA, 470 bp, Oryza sativa
  unsure (1)..(470): unsure at all n locations
ctaatatttcagatcaggatgccaacgttgtatgcaaattatggttgagtttgcgtatagttactaacctcaaaagttgtcaggttgcaccacagtgggaattgtaaaatcattatcatgattaatatttgtgataaacaattggttntgcaaatgatttattcgatgaattgatatggaattgtgtgtggatgttggtgtgagtgcctatgactaatgtgggttaggttgtgatatatgtacataaaaacggttgttttgtctgattgtgtgcaggtgacttgaggtcagccttacacaatggtgaggaccgagactatgctcangaggagcagaaagtctagtacggtcatgataccatgtaagaacgtgactagagtcaagattcttggaggacaacttcggtcaacggtgaggatcacgatattagatacggcttcatgcgaagcttgtgaggcgtgtcgtggctg

SEQ ID NO: 76328 - DNA, 463 bp, Oryza sativa
  unsure (1)..(463): unsure at all n locations
taactgaatgtagaaaagatttctcaactagcagtaactatttatgtataggcacaatcttcttgaccaagtaaataatagattctacaaactgcgctcactaaaagttggcagactttgggtgtaatttcaaccaactcccagttaataaactgaccaaatttctcgacaaaagcaaagcagtttgtccacccctttaggataacatctttgaagacaaaatcaagaatacacacaagctagtcccagcccgacaaaaaatctagcccacaagatatcgttgtaaaaggtggagaagcaatgaattcacatcgacttctgcatatgccatacggccaatacgtcaaacagcgagaagatccccaaattgaataggaaatcacgacgaagctcgtcggctcacccatgaattcaccttccaattcgccaaagacagaatctttgacctaaccggnggcatgat

SEQ ID NO: 76329 - DNA, 138 bp, Oryza sativa
  unsure (1)..(138): unsure at all n locations
gcaacaggccggccctacactaataacaacgtactcgttcaattaataaaagaacaacctatgcgagatattcttatactaccaatctaaacagacacatattcnaatatattatattaggacggattatattctgat

SEQ ID NO: 76330 - DNA, 459 bp, Oryza sativa
ctgttagtgcgtaagaagaatactgctatcaagaagaaatcggcagcagcaattctcaaaccagctcctccagtaagatactctcaattctactagttgattccagcgcggcttgtctaacactcgtctttttacagactcctcctcctcctccttcttaccctgtacaacaatcatggagtgaccgaactccatcggccgcggggagtcatcatattgtggaagaagaacaaccagctgctcctgctatcccagtgagttttcctttgatgcaagaatataaatcggctatattggcttagctctcaaactgactgaacttatacctgcaggctctagcgcgatctctactctcttgatatcgaagattatcttggtgaggcagaagaagatacttcaagcaaagctctagctctcttatctaacaatgcgaagaaaacacttgaagatatctcgcgt

SEQ ID NO: 76331 - DNA, 353 bp, Oryza sativa
atcttacagcgactgagcatgcacttcttcttttttgacttgtgagcatcctcgtagatatctgcatctttacaccctgaccacagagaataaattgtaataccgagtcatcattagtaggcattatggtccgaaaagcaactcggcaaattggcgaaacttattccttgatatgcttagaaggactcttttgaaatagttacagataagactgactacacacgactgcatgtgttcatattgaaagcctaacatccttatggagaagtccaaaggtaactacgctactaaagtgaagtacaggtatccacttaactcttaaacaaaaagaacctatgaacttgactaacact

SEQ ID NO: 76332 - DNA, 469 bp, Oryza sativa
tgtttggactgggctcgagaggcttgcatggaatctgatgccacagagagggagggattttgtgtcacataatattaagttttgctcaagattgggtggtgatgagtgcacacggcggctcacggaattggggctcgagtatgtggggaagcacactcatgatagctggttgttcaaccattatgagatatggtttgaattccgaaggccaaaagtttaagtcttgatagttggaagatagactggtgtggcatccattttgtaattttggtggtgtgaagtgcagagcaagctatggcctgtagttgtatgccaatgagctctgacctgagatcgagatcattgtttgctgggtgttggttcactttcgaccacacacaacactcatgatgaaagatccaatcgcccttgagccttccgaatcacatctggtgagtggcgaatgaaggctgtagttttcattagagac

SEQ ID NO: 76333 - DNA, 120 bp, Oryza sativa
tgaagtaaactgactgtctcgatcagacactatcttcttagggacgccatgcaaacacacaatctctgccatatacaaatccgctaaacgactttcggaataagttggctttaccggaat

SEQ ID NO: 76334 - DNA, 385 bp, Oryza sativa
  unsure (1)..(385): unsure at all n locations
nngagcaacacatttgacgaagtgagatgctcaaggtcgctcacaaggacaaaacaaaaaatagatacactacctctgtctcataagtgtagttgtgattttctgtgaccaacatttgaccatccattttatttaaaaaaattatatatttttttaaaaaatagttaccataaagtactatttatgttttatcatctaataacaataaaaatactaatcgtcaatatttttcaaataaaacggacgatcaaacgttggacataaaaaaccacatctacatttatattgngacagagacagtatttttttaatatatatgtatatgttttggataactaaagaagagtagtggagtgagagtgtgagacactcacttaaatagcgg

SEQ ID NO: 76335 - DNA, 456 bp, Oryza sativa
  unsure (1)..(456): unsure at all n locations
agctntgagctatatctgccaagtccatatcatctccaccgggagaatgaggtactgacaatgccggtccacggggagcctcaattgatagcttagacttgggaggtgtaagctccgtcggtcgacttggacgaggagtcatcttcacaactatgtcttctttaggccattgtatgaacgtcttgcgcgcatcgcccaaagtcatgatttcatcattngggggcacgggcagcggatagcctgaccaggtgtcctttactgtatcgatggacaccttggcatacccagctagcaggtctgcgccgtggaccttgtctgtaaccgagggcttgaaagccatgccctcagcgacttcaggagcgaaagttgggtggactctcgctagtaggacacactgtgctgcgccctgcataaggtgaaaagttgaattaatattggaatgtgtaaatgtcttta

SEQ ID NO: 76336 - DNA, 460 bp, Oryza sativa
  unsure (1)..(460): unsure at all n locations
tggatgcatcgcagtacacttggaaacccttctttggatcatgcataatcaanatgggtgctgatattatgcgacttttcaactcttgaaaactctgctcgcactcttctgaccacttgtacttcatatctttctgaagcagtcgtgtcaggggcttggcaatcttggaaaaattctttatgaacctccagttataacctgcgagacccaggaaactgcggatctctgaaactgtcctcggatgtttccagttgggtacggattccacattactatgatcaacggcaactcctccagttgagatgacatgaccaaggaacttcactttatacaaccaaaattcacatttgctaaacttggcatacaactgatgttctcgcaacttctctagtgcaggacgaagatgctcgttatgctcttctatggttcacgagtaaatgacaatgtcatcaataaagac

SEQ ID NO: 76337 - DNA, 398 bp, Oryza sativa
  unsure (1)..(398): unsure at all n locations
agcttgtcagtttcatagcanacacacaaagctaccagcccaagcactgcaaaccatccctctcacttggccattcttgtgctgggggctcgacatactcggaccattcccacgaggacagggtggctacaaattcctgttcgtggcgatcgacaagttcaccaaatggatcgaagcaacactcacaggggaaatcaaggccgacaacgccatcaaattcattaaagggatattttgcagatatggattgcctcaccgcatcataacggacaacggcacccagttcatcagtgccgacttccaagattactgcattggactgggagtcaagatctgcttcgcttcggtctctcaccctcagagcaatggacaagtcgagagggcaaacggcatagtac

SEQ ID NO: 76338 - DNA, 458 bp, Oryza sativa
  unsure (1)..(458): unsure at all n locations
tgttggaactccggagatacctatagtacgttccattcaagcagatcacacantcctatttacctttaatttgacctgaaactgaaaacattgctggataatcgttaatggtcacgaagatgatggccttcactgtgaagtattcccttaagtactcgtcccacactatcaatccctctttccataaatcagccatatcttccaacaatggttcaagaattatgtcaatatcaataccaggctaacggggtccctgtatgaggatacatagtagtacgtattttcgcttatgacaaagccaggtaggaagattatacatggtgaaaagcactggccaagtactatgtgagctgctcatgtctcanaaaggattaactccatcagtactcagggcaaatctaatggtccgtgggtctttagcaaactntctatactgagcattcaaagttatccactta

SEQ ID NO: 76339 - DNA, 258 bp, Oryza sativa
  unsure (1)..(258): unsure at all n locations
gcttgtgtcacaaggcgctatatacctgtctttaccttcngtagcttctggggccaatagattcggtacatccaaaagcatgcgttctagagctgccaatgtctgtgtcgggccacccagatgagttcgaagctcaaggtttatgcagtgccgagcagcttcatgaatgccccaccaaaccgcagcaagattgtaactgagtagatctatcaataatagttctgtccacatctggacctttaaataattcgttcccat

SEQ ID NO: 76340 - DNA, 464 bp, Oryza sativa
tcttgggcgaccgtggacgtcgccagtccaccacgggttgaatcttggtggcgtccatggcgaccccttgctaagagacgatgtggctgaggtacaggacgcttgggtccccgaacgaacacttggagcgcttgatgaagagcttggccgcccgtagcacagtgaagaccgaacgcaggtgctgcagatgggccgtccacgacgggttgtagacgaggatgtcgtcgaagaagaaaaggacgaagcggcggaggaacggccggagtacgccgttcatgagcaattggaacgtgaccggcgcattcgtcaggctgaatggcatgacgaggaactcgtacagaccatcgtgagtgcggaacgccgtcttgtcgattcgtcgtggtgcatcccgacctggtggtagccggatcgtaaatcgagcttcgagaagatggcggcgccgtgcagatcgtccaagagttcgt

SEQ ID NO: 76341 - DNA, 337 bp, Oryza sativa
tctttcccacgcagtggagcttggagagcaagtgcaccgttggaactagtgcgcacttatatagttggtaaagtgccaacaatctcagaaggaggaaattggtactttatcacatttattgatgattatacagaatgatctgggtatattttctaaaagaaaaatcagcagccctggatattcaaaaaattcaaggctatggtggaaaattagagtaatcgaaaaattaaagtattacgcaacgatcaaggaggagaatatatctcaaaagaatttgagaaatattgtgaaaatgttggcattctaagataattaacgacaggctatagtgctcaac

SEQ ID NO: 76342 - DNA, 456 bp, Oryza sativa
  unsure (1)..(456): unsure at all n locations
ngctgatatgctgagaaaccacccacctaaagaactgttgtcaaatctgaatgcaaatttggagtcaccagaggtaatagattaaatttcatttgtattacatgcctggagtgttccatcaatccaatgatcattgtcattagtatatctttgaaatttttgcattttgttcctcaccataacctgcatcatctgtgattgttatgtgcagacaaacacatgcaagagcgtgttaagctcaatttagggaattatcattagagtggattttttttcgacatgctaaaaatcgtagcgatgatagttgaatacacattctcagattactcctgactgggcatggcactcttgtttttctctttgtgaaatgaacataagaccgactaattcatttatccatacaatttgcttcatcaatatttatcatgttcttgattattaagtgcttcatcaata

SEQ ID NO: 76343 - DNA, 315 bp, Oryza sativa
  unsure (1)..(315): unsure at all n locations
atagctctcttattgtacacataccacaggtattaggtaattaaatactaatatagatatttttagagccatcagtcggctatattattaaacttgctcttatgagatatattcctagtactaggatatgtcatatgcctccaaaatcttttatattatagaacggagggagtaccacttaagaaaacacaagcagctttgccaattttgattgtaccatcatagtagntaatcactatcatttcagaaaagcaagctccataaaagattgggtcattaatttcctgaggtaaaaatctgatacatttcagcata

SEQ ID NO: 76344 - DNA, 300 bp, Oryza sativa
  unsure (1)..(300): unsure at all n locations
ttgcggcaaggatggtgtggtggttgctattcttcggtgagagaagcttctgcggcttgacagatgtgaggttctaccgcggtcatgaaagggcagcatgatcgctttctcgcgatgtggcgacgattntcagagagataagctattgcggcttatcggatgcggtgctttgcaacgatgatgggtgatggacacattcacgccaaggaggcatagattgttcgccagatatgaaattgacgcttggtgacatgagaccgttggatagactatcttattccccttcctccgctgatggta

SEQ ID NO: 76345 - DNA, 275 bp, Oryza sativa
  unsure (1)..(275): unsure at all n locations
aaaaatatccaaanaaaaggtgtgcctctctcctcagcactagagagagcaagccaaaaaaaaaagaggatccagcgagcacaccacaccattccccctttggtaacaccttctaccaccggntcttggtttcgttgctgttgggtttgtgtttgggggcgccttttgggttaggctcgcgtctctacttcgactagcctaggaccagcactgtacactatacccttgagcgattattcaatttggcttggctaacgtggnttctaagtttctct

SEQ ID NO: 76346 - DNA, 344 bp, Oryza sativa
ctaagcttcatgagactgcacacccatcgagtcgctgaagtatggcggccgtcataagatggcgctgccctgtattccgaatccaccccgcatgaatcctctcccctttggatcctctccatcgttcctgagtaaaacacatgtgcacgtgtctccgggatataaagaaaatgaatatgaactcgagaaagaactcacctgatagtttaattgacgtgcacgatcacgggtaataggaccatcatgctgtacttgcggggatgtggatgtttcttggtgggaacaccatggagggactcaatacgggaaaggtagagttctgactacttacctcccctattaga

SEQ ID NO: 76347 - DNA, 466 bp, Oryza sativa
  unsure (1)..(466): unsure at all n locations
ctaagctgtgtccatggacacatattgctaatgaatcctattttctttattaacaaatacacattcacagatgttaacaatttgagcgtgctgaacgtaatattagctgctgatacaccnnnnnncntaagaatggcgtgatagacaggcagggcaggttaatacaattacagtttattatattatactcccatccccatgaaagtatacaacacccatgagtggcaaaaataccattgatgtggaaggaaccatatacagttactccaaacagtggtttgatcataattagttgggctctgaagcatcagatacgtttgaattacaacgatacaagacattacattattgatgggaatcccttgtgaatactcaacaaanattaaatcacagttagctggttagaaattgtatgtgatcagttttgttgaaaataaagggagcaaaataacggtctcaggtcatg

SEQ ID NO: 76348 - DNA, 407 bp, Oryza sativa
aaccttggctcacacatcaaatacttgtcactatagtcctcgagactcggcaatgatccgttcccgctcctcgcaaagaacatgaagaacctcatctacctgagcatcatgaagtggtgctgtgctgaggaggtggctctccgtgaagggtggttccctcgcctgacaacacttcttcttggtgacatgaagcaagtgcacactattgtcatcgaaccgtcagcggttgagaacttggaggcgctgtacttggtttctctgacggctatgacagcggttccgacaggcttggagctcgttgggtcgctcaagaaagctcgtgtgtgggggcaagcagacgatttcaagctggagtggaagaggagaactgggaaacatactgcccatattccgaaatcgatttaatg

SEQ ID NO: 76349 - DNA, 467 bp, Oryza sativa
  unsure (1)..(467): unsure at all n locations
tattgtggtaattgtaggagttatagcctatgctattagactctgtgattaccatgatttttatcatatgtggtggattgtcttcagagactttactctgattcctgccaaatatgtctatatgcggaccttntgagtgtttatcactcgggccttgtcatatttttccttgatatattaaagctaagaagtagtcggctgggtgtcttactggataccacgcgtgctttgctatatgatgtttggttgtaaaaccatttggttcttgactatatgtttagtttttaactaaccacatagtcgggggctacacctaattaggtacatttgctcgatgcgccatgttttattgtcgccctttacagtctttgattttagtactcgacatgcttatgcatgaggaattgatgcactcggattattgccttttgttctgagaaggctatttcggcgactgcaaaggtctc

SEQ ID NO: 76350 - DNA, 327 bp, Oryza sativa
gcttattaactcaacccgacaatgtattcttcgtcatattggcggattcggctcaataagctaaccctgtgcaactcggactttgctgatcctgatcacagctgattccgacttcagccgattcttactctatttccgaaacaatcttggatttaaattccgcttcaatctgatctctatctttgatactcagattaccaaatttggtcgttaacacatgcccaccaagtccagaatattggataatgtttcgaatttgccatacgtcgactccgagagaaatccgcacttgccgttttccgaccggtacacagtgctttaaatact

SEQ ID NO: 76351 - DNA, 408 bp, Oryza sativa
  unsure (1)..(408): unsure at all n locations
taacccgttaaatagtggacaatacacctactgcattgtattactattccataacagtgcgcataaatattatgacaaaattttacctaagcgttgcactggccattacatattaaaggttatccactagcttcttttaagtagtaaatacaccacggttattcactatttacaaattattagaagcaaattattattaccatgaaagagttcaagataagtaattccaatatttgctctaactcacgcggacacaaaattatgttaaaaaagggatctacaatattgtcatttgaacccaatgtcgatagcccggataatttctactataaattcaccttcaatggagacaaactttggtgatatcttntccctactgaacttcgggctggtagctggatcctgcat

SEQ ID NO: 76352 - DNA, 356 bp, Oryza sativa
  unsure (1)..(356): unsure at all n locations
ctttgcagatcgcgcgccactagctaagctgagaccactgagagctaattagtgaggtggtagtaacagcttcgagctgatctcggctttgagttacttctcctttctcctaacttccacttgcaagtgtctgctgatctgccgcctccttgtgcgggagggaaaacgaaagaacacaaaaattaatcctttggtctcaacaagtggagagatcaataaatgcttacttcatgcctagctagctagcccatcgaaccatataacaaaaagatttaaattttaccatcttacctactatnggnctctatcaatatcttctatcccttaattagctgacattttacaactctattttt

SEQ ID NO: 76353 - DNA, 433 bp, Oryza sativa
  unsure (1)..(433): unsure at all n locations
ttgagatantgccatgcatctcaatattatttgtagataatataatcatcactaggaacttaatgctagatcattaaaaatagtaatgctctaatgcacctaattcattagcttgtgcatcagtgctgataattaagcaacttgctgagccgattaatgaagctggtttccgtacatatgtgttggtttaatgagctagctgcagaactgttgcagcaatcatgctgttcaaactttgatagtaatattgttgtcgcacccagcaatattatgctgcaagtggcctttctgggacctaatttaagagagattccttctgaatttctgataatttgtacaggtcaaagatgtgcgggtgaacacttcttacaagtcatagatggtccacccactcacncacaattcatgtacatgttcaaacctaaaataatgt

SEQ ID NO: 76354 - DNA, 260 bp, Oryza sativa
  unsure (1)..(260): unsure at all n locations
aactttattttattttatttggaatacttgcctatttactttcaaaccctctttctctttcatttgacagaagtaataacatatatttataattgggatgattagatatgggtagaggactgaaagcttaagggtggttactaatagtgccacctacttacctatatggtcagtatatgatatacccctcacctatatttatctcacaatatagagattggcaagttgattancttatcatagataaaatagaatacaat

SEQ ID NO: 76355 - DNA, 396 bp, Oryza sativa
tcatcagagaaaacagtcggcgcttcttcttgttggttgtctggagtccatgcagctaatatctatggtggtggacgttgggggcaattggacatcctgagtgtctgtcagtaaatgaactctcatttcaccaatggctatgcagcatccgaatgatcattcgagagccattgcgtcggggttttgacacagtggtcacgctagtggcatggacgatttggaaagaatgcaacggccgggttttcaatcatcaacaaatgacctgtgtggacatcgtgaatggaatggcggcagagacagcactctggcgccaagcgaattcagccatccctgctcttgatctcataatggacttccgtagccaaaacagaccgtgagagataaacacttgatttt

SEQ ID NO: 76356 - DNA, 146 bp, Oryza sativa
gaatcaacctcataatctaatgggcataatagatacattgttcaaaggtcccctctgatatggcaatctcttgcatcatgagggttatcatcattgtttccatatctagggagaattgtggctcacacaatcctattgaccacact

SEQ ID NO: 76357 - DNA, 483 bp, Oryza sativa
  unsure (1)..(483): unsure at all n locations
acacttaaaactaagcttanatataataggtgtatacaacttgctagcttgcaccttcatatgtggtggcctccgcatacagattgtatgcaactttttccttgattcaaattctgaattcagtttattattcctttttccttgcaccaccctttcaaaatgcttaaagaaccggatgatatcaaaatcagatttaaaatggtttttcaagtcattatttagactttcactcaattgtgtacttctcattcctaatgtgaagacatctttcatatagcattcggcccatttttctttcaacttgtatatactatccaaccaggtttgcttgctcacttttgccctcatgatgtcaaatatttgttcaaatgctgccatgtcttcgtactcatatatgcatgcactataatctgacagaacacttgtgtcttctttgcttctctcattcttcactccacctaaatggttgatggcataatgtgg

SEQ ID NO: 76358 - DNA, 332 bp, Oryza sativa
  unsure (1)..(332): unsure at all n locations
agcttgcatatgcagctntgcaaagtatgtcatacctgaaacataataaaaagaaggattacatttctgtgaattaaatgggcgatagtgaaacagaggtggacatgcacagatttcttacaagattccacttgttccacccatcactctccggactgttgacccaatctcattatattgttccagctgcatcattcattgggtagctggcaaagacgaatatgcactataaattggtcaactagtacatgcaactaggggaaaagatgcccaacttaaaaatataaatcgggatgaagactggctggcttgcagtactaccaatacgttat

SEQ ID NO: 76359 - DNA, 426 bp, Oryza sativa
  unsure (1)..(426): unsure at all n locations
tcaccccatgacctgtgagctgtgacatcattgcccgatcagctcattccgcggattcacgcactgccagaacttgatctgagaaagacacgagcagcaacggttgcatttgaatgacatacctgcaagacaaggatcacaatgaaacgttttggatcaaacaaagcctacaataaatggtatctcacttacggctcaaatagtttgccaagcttctcacacaagcactcaaatcctagtaaagctccttcgcgagattttgcagaagctctggaatggacagatttagttatagtttcttgtcaaaaaggacagagaatccacaaaagaagaaagtacgatgcanagtattatcctgtcattgaaagatgcacgagcgaggtcatatgtcttcaaaatgctgaattatgccattttgtaacatat

SEQ ID NO: 76360 - DNA, 478 bp, Oryza sativa
  unsure (1)..(478): unsure at all n locations
gctgctacgtgacactatntaatacacgtggctacgacacaccaagagatcatgccttatgacaaagtttatatgtctgtgcacgtggtacatagggaggagagtgtagtgcgccattctgtcactacataacctatcgattggtttgcgaggctggtatataagattgaagtgcatgcataaatatatatcggagacctataaataccttctctgttatatatgaggatcatgatatggtgtgcatgatgttactatttattacttatgctcactcaataacactatgtttatcgccattgactcatggaatgctgcatgaccgacaagttaattcgattatggtaagtcagctggtntctaaatctaacgcttgaaaaggagactagaagacgaagtctaagtcggatgactgantctacgcttaggcagactatgaagagcggcaaactttttcgtacgtcatgactcacgatca

SEQ ID NO: 76361 - DNA, 236 bp, Oryza sativa
attagctcgtatagaaaattataatgacctggttgtcattgaaactgaaggtcttttaaaaattactttatgtcaaccggagagcaaggggcaaaaaaaaacggtacaagtctaattctacctcttttttcatataaaactttcactgaatatttttatctaacaagaaagtatgaatttgcagattaacattggttatgaactggcgcatcaagcatgggacttcaaaatacaac

SEQ ID NO: 76362 - DNA, 391 bp, Oryza sativa
  unsure (1)..(391): unsure at all n locations
ngtgccaaatgtatgagaagcgtgctttcagtcttcagtctatgagagtattagttattgatgaggtgattcttgagtcctaaatcaaacttttttgcagtataagctcagtctgctaatgcaatatctgactctgtatatttgcaaagagcccaagaggctatttgaagtttggaactcatttagttgatttttttcaagacagaatacctaatgtactcattgctgtttgataggttgattttatttttgggtcgtcaaagcaagtaagctctcttcgcaaaatattaacatcttattcagcagcttccaatcgtcagaccatatttgctagcgcatcgattcctcagcacaatcgctttgtgcatgactgtgtgcaacataagtggac

SEQ ID NO: 76363 - DNA, 419 bp, Oryza sativa
  unsure (1)..(419): unsure at all n locations
agcttcgcaagtccctcatcgattgcggctgcgcactcaacatcctcttcgccaagaccctggacgacatgtatatccctcgcacagaattgaaaccgagtaatgcgccctttcacggagtcattccagggttatccgctacgccactcggccagatcactcttccggtcaccttcggtactcgggagaactttcgcacagaaaacgtctgcttcgaagttgctgatttcgagacagcgtatcatgccatactcgggcgcccggcgttagccaaatttatggctgtcttgcactatacctacatgatgatgaagatgcctggtcctcgagaagtcatatccctgcggagtgacatcaaacaagccgtcacatgcgataaggaaagctgcgagatggcccanactcgcgagatcacgatc

SEQ ID NO: 76364 - DNA, 433 bp, Oryza sativa
  unsure (1)..(433): unsure at all n locations
ngagggtcggcacatcataacggaagtggaagaagatggtcgacctattgccccggcagaagccgccaagaactatgtacgtcacagcgtgtgggttatgcgggataacgtgcctgtcattactgtgtactggcgaataacaatggcacgcggagatcatgatagctttgtcccaaattcggagaaagagatgctgtggaccacaatgctcgagacattcacccttcccgcgggtacagaggacaaagtgaaaaggtggactctgaagaaaatggcagaacagtttcagagcttcaagggagatctgtaccagaaatatatcctgaatgggcagacaccgaactttgacacattcccaaagctaatggatcactgtgacgagttcggtgcatataagacaggtgaacaatggcaggcgatgatggaaagaaac

SEQ ID NO: 76365 - DNA, 247 bp, Oryza sativa
tctcggtgtggcgggcgtcgtctatgagcaaaactttgtttctgtcaccgcttccagagcccctcctgtccctcatacttccggtgtcccctcctgtgtatacagtcgtaaatgcgagttaagcaacactgcaaacgaatgacaaatctctctacaaaggacgcagaattgcaaaaagtacatcgttgcacataatcgataaatcaccttcttgtgtcacgggaagcgtgtctagcttggactggtc

SEQ ID NO: 76366 - DNA, 320 bp, Oryza sativa
tttgctaatctcacataaaattgggctagattaaattgtggtaaatactttacaaatcatcttgcttgatataacgaagagaaacaagatttacctctaccggtaaaacggcttctttgccataaaccaactcaaaaggagtgactttagtggcaccatgtttagatatcctatgcgcccacaatgcttcataaagcacctcatgccacctcttcgggtgttcctcaatcttctttttcactagctttaacaatgtcttattactcgactcggcttgtccattatcctgagcgtagtaaggagaagaactcacacattta

SEQ ID NO: 76367 - DNA, 393 bp, Oryza sativa
tactaagcttgtagtacttctttcttatgtgacattttcccactgattgtttgcattgccaagcttgtcatgataatttgtgttctaaatacacatatgcagacgaattggtgatattgtaaacgggagctcttcgctggcctttatcagtaacctgacgtctttgaatatcctgtatgtgacatgttttaaagttttattaaacatcttacagttttatacattgaaaacttgtttctaagtttggatcttttgttctttcagaatattgaggaactgcaagatatccgataatctcagaacagtagatttctctaagctcggaagaatataccttgtgtaagttttcttgacataataccaccgtctattgctattgggtaataattcctc

SEQ ID NO: 76368 - DNA, 455 bp, Oryza sativa
cgggcagctggaagaagaagaatacaaatatataggggtgggactttagttaccaaccggggcttaagatccccgagatctttaatcccggttggtattaccaacccggactaaagttacgatctttattcccccgggtggtggtaccaaagcggaattaagatgccggggggcctgagatgcccgtgaaacattcgaaccgggactaaagaattaatcccgggtggtcgacttaagatcatctttagccccggattttaatggatgcgggactattgtggaattcgggccaactacgaaagatgtgttcttcaccagagaaggctttcaaggaaggagaccaaactttatctgacaaaacctcttttttcttttaaaattagtctttgggaatttaacacatagtgagtaaaaatacttaacaagtcaatattgaacaataaaacataacaggt

SEQ ID NO: 76369 - DNA, 449 bp, Oryza sativa
tactaagctgagctgattattagaggatctattggactatattggatacctaaataggaagagagtagagtagaatgagtcagaagaattcccgagctatcggtaatcttcctcctattcttttattctggttattactctgaaattaatataatattcttcttgagtaatttagatttatcttgtgataattatctcttggttagttcctgaatagcatacgggattattgttcactataatcaactaaaatatagtgattgcttttgtgagttataaacattggagtagatagtagttgcttagacgtggtgtttaggtaattgttatccagtaattgctgcgtatcccacagtacgtttgaggtggatgtagaggtggtgatagccctcgagattacttaagtcctccctgtccgggtacgtagtatagcgacatctgggaacaac

SEQ ID NO: 76370 - DNA, 338 bp, Oryza sativa
atgtgcaatgcgtcaccggctgcatggccgttctaagtcggttcatatcgaggctgggagagaagacgctacccctatttaagctcctcaaacgctccgggccgtttatctggacggaggaggctgatcgggccttcactcagttgaaggcgtacctcagttctcccccagtcctggtcgccccggagccagatgagccattgctactctacctggcggaaaccccgcatgtggtcagcgcggcgttggttgtggagcgcgacgaagacaacccttaccccgcgcattcccaccctgtgtcgactcgacccgggagagagcatggaggagaggccccc

SEQ ID NO: 76371 - DNA, 445 bp, Oryza sativa
tatcaaattcgtctcgagtttacatacgaaatcataatttgttttgttgattagttacggttaataattgaaatgtgcgtccggatacttcaaaaaatttacacccaaagaacttaacacacccttagattgtttttagctcataaattagtttatgagtctaaacgtctaaacaaatagggctgtagcgtagttgtatcacttggaaaagcgtgccgtttcacaagttctcttccggtttgccacttctgaaaagtttgcgaacacctatattctcagtgattatcagaaggggagattctgtagtgacaaatcatcaagagatcagaaccaagcacttattgcatcttccaacagaagttaaaaacattccaaacacatgtccacaacggtgcatggtggttttttgctaaatcacctctaagcatgtgatcgattacagaca

SEQ ID NO: 76372 - DNA, 274 bp, Oryza sativa
  unsure (1)..(274): unsure at all n locations
ggacgccgccctcaccgacttcgagcgccttcgggaagagaacattcggcggaacgaagccattcttggcttccttcggcggaagggcttcgagctcttcggcggcattcaatccttcttcttggtgaagcgccccaagaaacatacggcggcggcgggcgcgaacccgattcccgttggtcttcggccgttccttcggaacagggggcttccccccttcaacttcaactttttcttcttncgcggcttcccggcccgggccgaagtcccttcc

SEQ ID NO: 76373 - DNA, 305 bp, Oryza sativa
cacccatatcaccggcgacgaagaggatcatcagctacatggtcaccgcggcagcaccgtcggagaagaagaagacggcggcggacgaccggttccgcaacctatgcacctgcagcgcgcaactacgcatgcgcctctcggagctcgacgcgacggagccggagttcgtctgcgagaagacgctgcgtatgagcgacgtccaccgcaaccagaaccggctgctcttctcctgcaagcgcaatgaggacctcgaccaatgcccgatcacccatctcttcaccgacattgagacgcatatcgtccac

SEQ ID NO: 76374 - DNA, 385 bp, Oryza sativa
  unsure (1)..(385): unsure at all n locations
agcttacgacaacagcgtcaaaacagcctatgtaccaacgatgtnttttttccctatgatatgaaaggatttttttttttttgaaacttgatatgaaaggattgtacaatattcctaacaaacaagttgccaatataggtgtgtggcgtgtacacctttcttctcagctgaagttgcggtgggcttattgagaaaagcttaggttatcactacagatgtgctatatatgtttagagaataatgatactagtactacaggacaaaatatggtagagcaattgcagtgcctatactatactcctatataaggggttgtttggttggcatactcacgttaccaaaactttgcatacttcatttagctaacatgcctaacatgtggata

SEQ ID NO: 76375 - DNA, 402 bp, Oryza sativa
agttaagctagcccgtgacttatgcattatttaccaagtcgatcgatcgcaataatataattaaggccgagtttacttccaaactttgtctttaaacttgcaacttttctatcacatcaaaacttttctacccatacaaaattctaactttttcactacatcgtttcaatttcaaccaaactttcaattttaacgtgaactagacaccctaagttactgatctctctccctccgtagaaatgcgaaaaattaactctacgtaaaatacttgtcgatctcggcaccatctccaattagtctctccaacttgcacgcatgatcatcagtctggttcattgagtaaactcacgtatatattctgctgcatgccactagctctatacacatgtagccagctatgta

SEQ ID NO: 76376 - DNA, 439 bp, Oryza sativa
taatggcgaggaatttatgattatgcctaacaaaagatattctccaccaaaatatcaatgcataaatgggcttcctcaaaagataagcatttttgagtctcgacacggtctacaagatattactttgaccaataatatctacaaaagtaaaatatttcaaataaaaaaagttgcatattatgatagttcatttaatgataaatatagtaacatcaaatttatatgattaatctttttagactttttgctattaatagtcaaaatttaaaaagtttgactttacactattctaaaaatgcttatatcttaagatagagggaatagcatataatgcaataccattttaggatggaaactgtcctcatcatcctcaactctatcatcttccctaatgggtggagagaatctgaggagtgcgcgagccatatcgagatggacg

SEQ ID NO: 76377 - DNA, 337 bp, Oryza sativa
cttcaaagcaaaaacatttggtcttgcatgaatatgcaaaatcaatttgctaaactgtactttccgctgtactccttcggggtttctttttatgtccttcgctttattcaaaaaaacttcaagcatggaaaaatatgaatcatgttgtttgtttaaaattagagacgaatgtcttcaaaatcaacggcgggtaacattaaaaaaacagagggattagttaggttgtttctctaattttcgagttacatattctgtcggtcttacactgtcgtttcctttttttttttttggcccctgccacgaatctgctatggatttgatatctttgacaccatcg

SEQ ID NO: 76378 - DNA, 463 bp, Oryza sativa
  unsure (1)..(463): unsure at all n locations
tcatcaactaatcaacgagtagctgtcagttaatactagttcttaactggtctgattttgtgggtttggagtcggcactttctattggtaatctgtgagtccagtgatacagtctagttatatgaccattttcccccaaacttcttgcacaacacattgtaaacaattatgacagtggtatatgtatgagctctgaaattcagactacctgtatgaattgtttatgaaccatttgtttctacactgactagctaaaggccccatgcgttgcaacggatattataagagataaaagcaaaagaaaaacttaaatttagcatagttagttgattaggcataaaatgccatatataaagcaaaaacattcatgtgtatggatcttatggccccacatgttagctngtgacgttggatgcagacgctgacaccaccactagcatcatttaaagaataatatagataa

SEQ ID NO: 76379 - DNA, 318 bp, Oryza sativa
gcttactcatccgagttacctccatccaagtagtagtccaactctaatgtgagggaaatagataaagactgagtactatccactgtactcgacaagtcataccaataagaggtatgatgcaagcatttacaaggaggctaggggcttttttgcataaagaagttctaaaacaatagttgagagcacggaaactattgaaatagattagacaatattaatcatcaccatccaatgctaaaccacgttgtgacaggcccaaccatccacctgaacaataccaattccgtttagtcaaattatttatgatgagacaaatca

SEQ ID NO: 76380 - DNA, 476 bp, Oryza sativa
  unsure (1)..(476): unsure at all n locations
tcttgagcttgctgtacataatataaaagaatggaaaacattttttatgaaagaaaanaaatcagaagtgaagagaaggaaaaaaaaaaaggaagggaagagaggaagttgttgttgttgctgttgtgtttgtgttattttcgtgctattttgagtggctacgcttgtgactaggctcgcgtctctaaagggttttgcctatgaccagcacaataccatcgttgaatgattattcaacttgctttgattaatgtggttctagctgtaccttgatattacttgcagccacctatagctccacaaatttttatctactatatcacaggatcgtgtttgttgtcggctccagtactactaaccgttgttgctgttcttgctgtttgccaacgccttttacataacatagtaagaacatgtaagaactcgtttgcacaagtttggtagaagtggagatggacaacacctatcttcaatag

SEQ ID NO: 76381 - DNA, 476 bp, Oryza sativa
tcgatccaagaatcgcacgaaccctaatggcgcatagccgtctcccatgctggtggtgttccaatcatggacgaactggttcatggcattaacaaccctaatttatcacagaagcacagcagctctgtcttgtttctacctgcaaagccaatgatcatttcagattctgcaagaatcatgcaaaaatgaattcacagagaacaaaatttgtaggtttggaaaaattttaagggaaaactgaactctaaggatggatttgtttaaaaaaagtagaatgaaacagaataagagcaacatgaacaaacagagaatgaataataagcagagaatggccatcactgcaatctactacaaagtacaaaccctaccactttgatgacaaaagctgtagacctgcagaatgaaacaacctggagaagagcagtgctcagatcaacaggaaaaaaagccaagatgagagagaatcttttcttttc

SEQ ID NO: 76382 - DNA, 411 bp, Oryza sativa
  unsure (1)..(411): unsure at all n locations
agcttgccttacctatccnctatattgtttgcaacaagcataaactgaacaaaattcagatagcaaatctaactagattgctcctttttctacacctactcatgttacatattgntttctagctttgnttctgttttagtgcttacattatacatcaacctttttatgcttttgtttggcggatgaagagcaatgtgttgacctgaaattttacgcaatcctgatggaaaatctccaatggctaccaaggaccacgagttcttggtatgcaaataatgctgcaatctattactattaaatccaatgattntctgctatactatctaatgatttccctttgatccggcaaaatcttgtgaaattatttcgtgtccaatattntcttatatcatgccctttatagttacttga

SEQ ID NO: 76383 - DNA, 411 bp, Oryza sativa
tgccatatattttcttttttactccctacttcctataacaccaactttgtaaaatactcttctctaccacgtacaataaaggtgtgtttacttcatactaaaattgaaagtttgattgaaattgaaacgatgtgatggaaaagttaaaagtttatgtgtgtagaaaagtttggatgtgatgaaaaagttagaagtttgaagaaaaagttgggaacttaatcaagcctaattctaaacatgtgtcagaggaatagtggtactctctctgtccaaaaaaacaaatataaagctaagtactacgttggtgtttttataagacggagggagtatgttatactgtgcacgtggttcgtgcaatgctgtctaccatacgatcacccaacgagaagctgtctacattcataataacac

SEQ ID NO: 76384 - DNA, 446 bp, Oryza sativa
tcgacgcgtgatagttgtccttgcccagagcaactctaccgctccagcattcaaggctcgtgtcaatcatgttgctgctgcagaagctaaagatgctccagatgttgatttgggtacgttctttgttaactcagttcctgcaacagtgcttttcgattctggtgctacacattcattattatctatgaagtttgcgggaaatcatgggatggaagtagaagatcttatacgtcctttggtggttagtaccccaagtaatcaagcactctctttgcaacgtagccactctgtcagaatagaaattcaagaagtaccatttctggccaatcttattctgttagaatccaaagaccttgatgtcatcctatggatggactgggtagccagatataaaggtgtgatagactgtgctaacagaaaagtaactctcaccagtgatgatggtc

SEQ ID NO: 76385 - DNA, 474 bp, Oryza sativa
  unsure (1)..(474): unsure at all n locations
agctgtttaagcatatactacaggttactctattatcttggcttgggttatagatgcaaaaagcacatttaatggtataatctccctttcctctaatccaatcatggtcacaatttaaccgatccatcaattctatttttaaaccggctaagtccgcaattaaatctaactcttcatcggttgattcatactcttcattggtgttttcaatttcatctgtttctatgatagaatatattgattcgtcatcttttatttcatcatcacatactaatatattttcatttacgctatctataattaaaactctctcttgttcttcatatgtactagaatatcttttttgatctttattcgggcaagttctacttaaatgatctggtgaattacatatganacatctgcatgtcttatcnataagtttctttgggttatatcttcttacatttcgtttatgtaagaaaggtgctctat

SEQ ID NO: 76386 - DNA, 253 bp, Oryza sativa
  unsure (1)..(253): unsure at all n locations
agcttctgtgttgatagaatctgaatgtatgactgaaactttgtgcctttntttgggtaccaaaatctttgtgtgacagctgcttaccgccctgttaaggagctcctcaagagagaacgagaaaaggagatggtaagattgtaactcccctaatgctcaaatttgaagtttggacttgactgctcaatagtcgattctgaacaatcacctcgtgctcaacttgagcatacctgtctaataatacatcttttca

SEQ ID NO: 76387 - DNA, 463 bp, Oryza sativa
  unsure (1)..(463): unsure at all n locations
cctaatgatgtaagttatagtaattagttctactgccacattttgttatcgttcttgcatttgagcagtcttttgttcctccatttttgttcttttactttaattgtacatggtgcaccatcttgctgccttataacttcaaaattaattgcacatggtgcaccaactaacctgcctgactaataacttcaaaactactataatgcaagggatggctccaaatcttattgtgcccttatttcatttggttgatgtggtttttcagctccaagatggtggctggatcangtacatcattgtaatttctaacttttatcgtatctaactctagtatttgcacttgtagaataaacccccaagtaaaatagttcctactgtcgttcttctttttatttttatgaagcaagcattctgcgtagagaatcatatactgcaactgggaatgggagacacatttgatgac

SEQ ID NO: 76388 - DNA, 118 bp, Oryza sativa
gcataaagctgaggaccgcattggtgctctcctgcatgaagcccaccacgtaagctgtcccgatgagctcggcgctccttcaccggcggatcctcgcggactcacgcagaaccggctt

SEQ ID NO: 76389 - DNA, 390 bp, Oryza sativa
  unsure (1)..(390): unsure at all n locations
tgacattgatgacactggctggcaatgaccaatctgcttatgatgtaactcaggatgaagttgcagagatcactgatccgtcgcatggcttctgctcatcaaacatagtgtctaaaagcattggaaggtcaaacaaaacaaatatcatatgttatgccatacgcatacacataagaaagagcggatctgagttcaatattaatagtccccaaagcttgtggagctttgtccgctctccatgtgaaagctngagaccaaggactatacctgcgattgttgaagacatgacaaacgaaacaaaaactgcagaagcttcaactgcaaataagaggaagaatgcaaaggtggaagcatttcagtgtgacatagaattttgtgacatgacatttg

SEQ ID NO: 76390 - DNA, 260 bp, Oryza sativa
  unsure (1)..(260): unsure at all n locations
tgcagcatggcaagttacctattaattaagaatagntnggtagcttccttttatctttaagaaagtgtgtttaatggcctataataaggaccttatcctttccttttatctttagattctttcttggccgataaggactagtatctccctatgggtataaatatgtacacccgggggcattgtaatctatcaatatatcgatcaatacaactactctcggtgcatcgccaccctctttactgaggtttttatttatcatc

SEQ ID NO: 76391 - DNA, 448 bp, Oryza sativa
  unsure (1)..(448): unsure at all n locations
tgataactgtaccaccacanaaaggaatattggtgttttacaacttgagccanaatattaaatacgtaagttgcttgacaaaaaacctaccggagttgttataacatcctaccagatcgttacatttggtcgtttgtgctctgaaaaacaacaaaaggaaaaaaaaatcaactataatcaggattgaattgtactatggctagctagctagaaccatatggaccgatctttttagcttccatcagtttctgaaaaccacgtacacttctgaattcaattaatctcggcgatatatgatatgatctgcctgcactccacacccacctaaccacttcagataactgcatgagtgagtgagagtgatgcttcaaccgcaatattcttctacctatatatctatcgctccaacacgcgattgattaattaaccacttaattaactcgataat

SEQ ID NO: 76392 - DNA, 354 bp, Oryza sativa
agcttattaactaaacccgacaacgtatcccttgtcatattgtcggattcgggtcgatcggctaaccctgtccaactcggactctgccgatcctggtcacagccgattcggacttcagccgatcctactctgtttctggaacgatctccatctcgaactccgcctcaattccttcttcatctccgatacttagattaccaaatttggtcgttaacacatgccccccatgtccggaatattggataatgtttcggatttgccacacgtcgactccgagagaattacgcacacactgttttccgaccgttacgcagtgctttaaatattaagcgttacccttgagaagtttcacac

SEQ ID NO: 76393 - DNA, 425 bp, Oryza sativa
  unsure (1)..(425): unsure at all n locations
tcttatgataatgtgcctcgtttgttagccaccattgcccagaggaataataatatgtactatgacctacatacatttacatcggttgatgatcgaacaaagagtgtgctgcatagagcctttttctcattgggtgcttgcatcaatgactttgtgcattgtcgacctgttctatgcatagatggaactgttatgacaggtaaataccgaggtcagatattgacagcaattgggtgtgatgggaacaaccaggttctacctatggcttttgcatttgtagagagtgagaacactgaaagctggtactggttcctagagagagtgcacattgcagtggtgcgtatgatgcccaacgnttgccttatacatgatcgtcatgcgggtatgttgcgggctattgactacttgcagaacggttgggatga

SEQ ID NO: 76394 - DNA, 349 bp, Oryza sativa
agcttatgataaaaactgcgcaatgggatatacaaggactgaaaaccttcagtttcaggttttctaaaagacaatttaaggtatttcaatgtagattatgaagagcatcaatgctgtttgataatgtatcctaggacacacactacatcattgagtgctctttcaccacattgggaagctttgcatcgatttggccagaatcaacccaacatattgcaatttgcaagagagtcaaatagatgggcaggcaggcaagacgccacagcccacatggtggatggaattcatcatggatgtcaaagccccagagcacccagcatatcggcaatccaccccacacatggcacgg

SEQ ID NO: 76395 - DNA, 472 bp, Oryza sativa
  unsure (1)..(472): unsure at all n locations
nggtgccaccactcaagctccttgtttatcacgtaaaatataggagtttcagctcgtatgggctgtgtaaacacccgactgacgtatgggcccccggaaaatgacgatggcccctttgtcggtgttaggtatcttttcttcagtcgtttcagcttttaattacttgcttagtgcatctctgacaagattgtctcgcacaggttaaagcaaaaaatgcccggaagttttcccttgataaaaaaaaacgagaaagtatccacaagggcgacgatatataacaacaaacagaaaggtaaggtatatccacgggacaatcttcatgcacaacacgagttctagttagtccagttcttcgcttggtgcacgctccagcgtaatgaacaaaatgttatatagagtaagatgcgaaatcagtcgaaactatcatcagcgtcagctttattatatagcgtgatgagccatcaattcaaac

SEQ ID NO: 76396 - DNA, 311 bp, Oryza sativa
atcctcttagtcacctgcggcatgcaagcttgtacacgttgggaaagggtgttttttgagaaaagaagaatctacttcaaccgatatgcccttatgcaccgccatacattacatataaatcacacgcggaaggggtgggccatttacttgagcaccacgtgccgtatccaaactgattgcaaaaaatagtgtatcggccactttaagattaccatcttgggaggtccgtttgtgatcccaaaactgcttatcaacagtcggacaagtgggtaatgttggggtgaacccaaaaaatttgggtataacccggt

SEQ ID NO: 76397 - DNA, 407 bp, Oryza sativa
cacccatcaattgggatctctcaacacactccgatagtaggagccactcgtacatacaaagcaactaaaccaccttacccctgaccaagagagatcgagcgcgcggcggaggggcgatcgatattattacatatccctcaactactcactggccgtagccctttggtgcagctcggtgcatgtgtttgcacaatgagctaaccactctcctacatctccaagatgctgagcatcaagattccgtcggaggcgaggcaagccagcgaggacggcggcagcggtggcctgacggagtgctccgtctgtctctccaggatccgtgtcggcgaggcgacgatgcgtctgccctgccggcatgcgttccaccgggactgcgtcgaccggtggctcctctcatgcatgcggac

SEQ ID NO: 76398 - DNA, 299 bp, Oryza sativa
tgacacacgcatattcttttttggtgggcggatgcagttaaatgcttgctatagaataagaagaagcggctcaacacgctgattattttggtcgcttttgagatttggaagaatagaaacaattgtgtttttaatggtgttgcccctatcatggcggatgccatccgatcttgggctaatgagggcgtgcttaaatttctagtcggagcatcaatgctccaacatgatgtgtacttggacactattgtcttatctcctagagctatcttgtgtgccacatgaaagtcagcttgggtcgt

SEQ ID NO: 76399 - DNA, 459 bp, Oryza sativa
  unsure (1)..(459): unsure at all n locations
agcttctggtttacactatctaattactacgttttttatggtcaccaccttagtgcacaaatttgtactaaaaagggtggtaactcttaaaaaacactcttaattattaaaatgtattgcatctcttctaaaaaaatctacaatcaaatttctatttagagaaatcaaatttaataaaacattgacctattcaaactattacagtggtttaaggtacaattatacactagtacagaacactacatctgtaagggctcaaaaatcacatctataatggttggactaaccattacagaccaacagttacagacgtgaagactcatatgtaagggctagagagcccgtatagatgaaagttatctgtaacggctcanaacgtggagcccgtacatatgtgaaaattcagcttatnanaaatataaactaaactcgtaagcctgtacatatgtggagaattat

SEQ ID NO: 76400 - DNA, 462 bp, Oryza sativa
gtggctgagcttatcagcaccacgtgaaacgaggcatgccattagcgcatcgttaagtatggactattataaattacagaagtgaatttatttgatttttaataaaatatataaagtttttgcacgaaattagtggttcagaaaacgtggctcatggcaaactggccctaagacatgacaatgacaatcagtctcatttattcataatgggatgtctcataaacatcccaaattaattatttgcagttgtttgtgttaaatatgtgatccgaattttggaccaacaatatatttggattagttatctaataggactgcattataggattagtttcctattaggactttgagtctttacctattatgactcctagatgtctcctatatatatatcccttgtaagccgtacagggagggtgcgacagctcaatgtatccccttgcgttgtatctaactcctcta

SEQ ID NO: 76401 - DNA, 404 bp, Oryza sativa
gcttcatgtatccagcaagtataatgtattctaccctgagttccctgtttcacagaagaaataaagatgggctgagaatcttgagacctgttgcatgtgacaacaaaaaatatcggaagttgaccagcccgtcttataaaagaggatttaagtgaattgggaacctacaacacgcagtaaagaagtaaagatggagtggctattggtaaaaaaaatcaacagtgggacatttaagcatatcagccaggaaataacaaaacactccaacagtataagctaatctgaccaactgagtggacacgccatacaaatgaagaacacgctccaacagggtagtgacacacattcagtaggtaacactaaaatctttgaagtactgatcaattcatcttcatttgacagct

SEQ ID NO: 76402 - DNA, 447 bp, Oryza sativa
  unsure (1)..(447): unsure at all n locations
tatgcctgatggtacaatcgataagtacaaggcatggcttgtggccaagggttatacccaaaaggaaggcgaggacttcttcgacacatactcaccatttgctcgcttgaccacgattcgagtactacttgctctggcagcctctcatggtcttctcgtccatcagatggacgttaagacagctttcctaaacggagagctggaggaggagatctatatggatcaaccagacggttatgtactagaaggtcaggagggaatggtatgtaaactattgaaatccttgtatggcctcaagcaagcacctaagcaatggcatgagaagtttgacaccacgcttacatctgcatgctttgttgtgaacgaagctgacaaatgtgtatactatcgctatggtggnggagaaggggtgatcttgtgactatatgtcgatgacatactgatctt

SEQ ID NO: 76403 - DNA, 465 bp, Oryza sativa
  unsure (1)..(465): unsure at all n locations
tctccttctgagtatatcagatatgagcttaaagtttgcacatccacactccagttattttgtattcctctgtatttacccccttcatcttagttctctttcatagatgtgtcaaaacagttataagatacagttagctggtaccaatcttgtagctttttttggcttatctcatacacaaattggttcacaggttacaagtttgtctagctgatataagagcccttgcttccctctttgagaggaatcaagatgtagcatgcgttgaggacatactgaaaatgatcattcgtgctctttcagagggcccagttttatcatctttcttgtagcacgtaaatagcactggtggctgctgcattttcatcaatcttcttaagaagtaacatacttntattgtttacaattcatctctgtttcacatatcatgctgacagtaacattgatcgtgtaaaatatgatgtt

SEQ ID NO: 76404 - DNA, 326 bp, Oryza sativa
ttttctcgcttcacatatttaaatgtcctcccttgttcttaaaggcctgacttaactttgcatttttctgaagagaattagataatcatccttatcatgttcaagatcacgatctcctcacgttagcctttggtggagtttgtgtattttgcatgatcattatctcgaacattttttgtgcatgggttatgggtaagaatatgcgaacaagttccagacaggatttggagagaaaaaaaagaaagttgtgatcaaactccataggtggattttcttcctaacttactctaggagcacccagcactgcagcatcttgtattcattca

SEQ ID NO: 76405 - DNA, 425 bp, Oryza sativa
cggcacatcataacggaagtggaagaagatggtcgttctattgccccggccgaagccgtcaagaactatgtacgtcacagcggttgggttgtgcgggataacgtgcctgtcagtacggtgtactggcgaagaacaagggcacgcgaagatcatgagagctttgtcccagattcggagaaagagatgctgtggaccacaatgctcgagacattcatccttcctgcgggtacagaggacaaagtgaaaaggtggactctgaagaaaatggcagaacagtttcagagcttcaagggagatctgtaccagaagtatatactgaatgggcagacaccgaacttcgacacattcccaaagctaatggatcactgggacgagttcgttgcatataagacaggtgaacaatggcaggcgatgatggaaagaaa

SEQ ID NO: 76406 - DNA, 278 bp, Oryza sativa
taacctttccgggttagctatcaccaatgaatttgatggaatccaagaattagagagccaattaaaagatagttaaaaaggaactcatgtattgtggaatgctgggtttgacaaacttcttaaatttgttgtggaccaagcccacctctatacgaggggggcccaacatcgcacccgtgcttttatccttgctttgcgaaaggattaaacaagaaatgacttatttttgaaatggtcatggtaattatatgttggctataacctattttaacttccta

SEQ ID NO: 76407 - DNA, 446 bp, Oryza sativa
gtggggcgacgatgacaagacgccgactatggacggcgaggatgatgcggcgacttggcaccggctgtcggtgggacgcggtgctggtgccccggtggatccccaccccgagcggctccctcccgctatcctccatcgacaacgacgacaagaccactgccgttcgcgtctccatcaacttcatccaagtattcccctctgtctccgctgaagccgtcgaggaccaggccgcatcggtcgtccactacaaccctgtcgccggccgaatcacgaagccagtcgtcggtgagcctgagatcgacagtaccggcgaaggggtgtggttcatcggggccgaggtgagctacactgcctgcgtggactccgtgctcaccaccgacggcaccgtcgagattgatggcgagcgccttcccttctctcctccaaccccctcttcacttcctcct

SEQ ID NO: 76408 - DNA, 389 bp, Oryza sativa
tttatctaagctgtactggaaacacacactgggaatctgctatcttttgcagtaatggctgctatgcgctgttggcgtgcgttttttgatcctgcacttcaagaaacataaaacaattagggtgatttggtgtgctgtgctttggaaaactgatgtgggctgggaaagcattgtggaaaaagcagaagccgtttggtagagcagttgtgaaactgaggttgtaaaaaatactgtgtcgtgatatatgtccgggtaaaaacttaaggaaaagccccccccaacttcacgtgggctcccccaccccgaggggcggtcatggtggtggagtccccttccgacctgagggtggctccggggaacatgggcccgtctttagtttgtggacctcc

SEQ ID NO: 76409 - DNA, 308 bp, Oryza sativa
agcttgtggacaaagctattcgtcaggaatatcaacgcaacaaaatggaccgaataagaaaggcagctcagatcagctttcctcaggggaacaatcaaaagcctcgcttcatgacgggacagctatgtgggccttccaccctgatcgtctgtcagcaccgtccctatcacccgagtaacttcgacaacgactacaacggtggcaggcacaacaacagtaagcagcacaaccacaactcgactccacccccactaatggcaccagctcagtcagatccgccagctgtgtcagttcagtcagaacaaccc

SEQ ID NO: 76410 - DNA, 478 bp, Oryza sativa
  unsure (1)..(478): unsure at all n locations
tgtgtatacttacaatatcaagtagatatattgtacagtttatatgctggatcgntatattacataatttatatttgctaatttaaaacaaaaaactaaaagctacaatgtaagttaatacaataaagttatataactgtaactacttacagtataaaactgcaatgtaatttntgttttgcctacataattatatcaaaataacgtgcttgctcagttggtagctaactagacaccctgctctttcatagtggacatggatcatatataggatcaactctagcttcacctccgtacgtgctntgatttctttaagatgatcgatatatataagggagcactaattaaactgtgtgatgttagcctgctaaatagttaacgtcaaattaaccggccagtagcaaaaaattatatatatatgcgtgcgtgcgtgcgtacatgcatggtgcatattgatatatacatacacatgcatgca

SEQ ID NO: 76411 - DNA, 373 bp, Oryza sativa
  unsure (1)..(373): unsure at all n locations
gctttgacttctttacataaattaattattatataataaacacagagagataacatcaaaacagccaaacatatgggttacaaaactttgatcttagaaaactggaaatgcctgcagacggttttccttccgctgcatacaagttactgtttgttatcaaatcgcttttctgcaaaaggcagcttgttgtatagttgtttntcagtgtcatttaaacaaaatacaaaaacaaaatgtctgatacataaaatcgtttgatgctggtagaggctgatgactngtttattgcagatacggagatcaagctggacaggtcacacaggattaccttcacgcctctggaaacgctctttgagtcgcatgagctgtcttc

SEQ ID NO: 76412 - DNA, 439 bp, Oryza sativa
gagggatcatcggcttgggttgatgtatgtggctccacttgtgttgaggaagatgctccttgttgtggctccctatgacgtacgtccccaatagccaatcttttgattgcttcgcttgtatcctcctcttcacttaacacatgtgagttaacttgctctacttgagagccattagtttcgtcaaatgtcacatcacgtgcgatctcaacaatacctgatgtttttgttgaaaacgtgatatgcgcattcatttgacccatacccaagcaagaatccctcatccactttatgagcaaacttataggatctagccttcttattataaatgtaacacttactaccgaatacacgatagtaagagacatttggtttgttaccggtaagaagctcatatggagtcttcttaagaatgcggtgaagataaaggcgggtgatggcg

SEQ ID NO: 76413 - DNA, 403 bp, Oryza sativa
  unsure (1)..(403): unsure at all n locations
gagtcttggcttataccccaagtgagcgcctgtgaagatggagccgtatgcccgctagtccgctgctgtttatttntgattgtcaggccttaagtgcctttgtaataatggaaatattatcgatataataaagatgtgtcttttatatcatgtttgggtgggtaccccggcttttcctgggacggggattaatacactatcgttcgggaaaaggcaattttctcggtcgcgacagtccagctggtacagatcgaagagatccttgaaatggatccagagaacatcttctccttgcaagaagtcgggggttctgatcctcgctccgaacatctctctacccttgccgctcatttncatgtaccattcatggaatttgtacatatgtgtcggtagggactacaac

SEQ ID NO: 76414 - DNA, 470 bp, Oryza sativa
tctgaataatcaaaatctattgcatcacctatttatatgtttcatcctccacagagatccacacgacggctcccatcgagcgagcaaagcccctatggttgtcatggcatggcaccggtgtggctagaggatgaagacgccccacacatgtggtgacaggtgggccatgccagcctttgcgtgtgggacaaagtcaaatgcggatggagatcgggcattggtcgtgttctctggttttaccgaaggtgaaattaggacacagaaacaagaaagttattaaagtgttgtttagttcactatcacaatttgcctcaccatgtcacagctcaagttaaacagtttgaccaagttagatgttcgttcggttcatatcgcacttatgacaagattgtgtcatcatgacatgggttctgttgtcgatatgacaactgcatacgtcgaaagacgtggttactcaataatgattggaa

SEQ ID NO: 76415 - DNA, 263 bp, Oryza sativa
agatcctgatgtgggaggaaaaaccttatacatcaacctgtaatatcgatggtgggaattgagccactccttcctcattggataatttgggcacccaagaacttccaattcaacttccccatctttaattagcgcgagagcaacagggtattggtgcccacgtacaaacccaagcgtgccatccacaggatcaagcacccaaatacttccttttggacctccgatagagctgcaccttctaataacttgaagaatatcatgag

SEQ ID NO: 76416 - DNA, 290 bp, Oryza sativa
tgtgcgcgatctatttatatttatatggatatcaatcttctcatgtaaaagcatgacagctagcagaacaacgaatgcgattacatgtcaaaaatggctaccactactatgatggattctaatctctcgggtgaacgtgcacccgtttttttcatgtaacctaaatatttattaacaattttaatattatacacaactattgtttatatgtaatatatcacttcacaaacatgtaagttctaattctacttttatacctagttaattaatatatactaattctattttat

SEQ ID NO: 76417 - DNA, 445 bp, Oryza sativa
  unsure (1)..(445): unsure at all n locations
ctaagcttctacagtccattaaaaaagctctattctattttatgttattgaaagaattaaaaataattaaattatatatatatatttatcataactaatactcgatattttntcttgtttcgcgtgtcacccaaaatccccctgaatgaacttaactggctgggtttatatggtgacgccaacacgttgagcccaacctcgtgcatatcatcgtctggcccgccacgagatgttgtccccacaaagtttaagtttatacgtttcctattaccatgcgctaaaatatctatgactctacagggataatcctattttacaaccctttcaactcttagctgtgtccaaaagtaaaatgtactacaaaacacccaaaataagtgtaatttattagtagaacataaaaaacgtgtcacggctaanatatattgtaaatattggtaaatct

SEQ ID NO: 76418 - DNA, 424 bp, Oryza sativa
  unsure (1)..(424): unsure at all n locations
agcttatttactagttcagatatgatagttggtgcctgtttaaggtaatcaagcgtacatgcaatagtaacgatcatattgttactatttgaaaacttttttgttaaaattctgaatttcgtcatgcctgagaattgggcagttggttctaattgatgtctggatattctcttctttcgactatctaactaatttccattcaaataagtatttaaaatccacaaaccacagatgcaatgtccgccccaatcttgaggtgtgttgacttgtagatggtgcaaattggttggttcacactattttttaaatggctggtcatcagcacttgtttacctagcatataaaatctgcatcatgaagagaanatacttncaaatatgctattccaccagttagaaattttgtattggcactattatgcatg

SEQ ID NO: 76419 - DNA, 373 bp, Oryza sativa
  unsure (1)..(373): unsure at all n locations
ggatggtggaagaganaacccgccatagaagatatgagattataccacgacctcatgtgtgtcaggggttgggaatgcttcgccgcatgctggacgccacccaatgatctcttttgccggaagaacactgtgcgccaccatctccttcatgttctcctccgttacatcggagggcgcccactgactctcaaagctctctctctctctctctctcttccgccatggatgcgatctggatgatatgatttggtttggagtgtggctgggactaaatgggagattgatgcggtggttgcatgggagattttcgtggagttttggaggatggattggagtgaatcggtgaaccctagtttcgtcggtgcgggttcgt

SEQ ID NO: 76420 - DNA, 334 bp, Oryza sativa
acattgtttatttgcttatacctggtagtagcgctacgatccggtattatttcttcaccacctccacagtgtttattaccatgtaataaggtaatatttaatgcttactacctgctattttgctacatttgggatgcccttacgacgcagacttgcagctatgggcaacgttagctggcctaacaaactaccggggtttctggctcggtccgtggtgacaagtccataaccccaacaggtggggttgagcttggagctgcacttcatacttgatattctaccttggcagcattgatggaggcctaccagactaattaaagtactcatgatgcat

SEQ ID NO: 76421 - DNA, 465 bp, Oryza sativa
tacacttagatactaagcctatctggattgagatctatgagacagtgtgtgagccaaagatgggttgcatctatgctccctatatcatgaagatgattgaggcaaagactgggatttgttatttcaaggacaatcaacacaagcctttccgtcctcatgctcccactacttcatctactccttctaccaaggtaactcgtgcttccacctcagctgctccttcttcctctgctgcaccacagcgttctgagtcttcttctccgataaagaaggctgtcagggctatcttttgtatgtgtgccaagactgctaagaaggtaaaggaaatagagaggcatcagaatgaaaattggattgcagcatgcaaggatgtctctaacatctctgatgatgaggagtttgttgatcactttgctgcttatgagactgctcgagacattgctagtggtgatggtccctctggca

SEQ ID NO: 76422 - DNA, 358 bp, Oryza sativa
  unsure (1)..(358): unsure at all n locations
atgactatctttctatggttaacacaattttgagcgatcttagatctggtgattcttcttatgatggtaattacacacaatctaagggttctcgtcactttttgaatggtcttgacatgtctatttgggagatgaaagttacaccattttatgaatctggtgatatgtctactttgacttttgatttgctttatacaaaacttaaacacatgagatgaatattctttctcgtaaagntgattctaagtctagtgctttggtttcttcctcgacttctttggatgttggtgtttcttcatcgaagtcttctattcttgcttaattaatgccatatccgatgatcaactcgaacaagtcg

SEQ ID NO: 76423 - DNA, 465 bp, Oryza sativa
ctgttaccatatatctacatatgcaaaagttggtctgctgaataaagatggtgctgtggtttgaaggtacttgatccaattgatggtacacaaggtttctcgaaagtggatgatactctgtatgtggtatgcttctctatagttccattataatgttcatctttgaatagtattcatctgccattgatacatgctatgcagccatatttgttacatgtgcatgtgtacattcactgcaacaagcatatacaccaatatgaggggttatagttctgtgcacaacaaatttcttgtcatttcacaagcgtgggtcctgaatactggatatttctgggcaccctttttcatgtcaagcatgttcaatttcaaatgattaccttcgttgatatcatatgtgtggccatgctcgcatctataagcataatcataattatgagcatttgctctcgcctctttattcttttt

SEQ ID NO: 76424 - DNA, 414 bp, Oryza sativa
  unsure (1)..(414): unsure at all n locations
gcttgggagatgcaaaagagaagacaaatatggtgagaataccaacaacaattacaagccgaaaggcacatctcaagcgaggaagtttaaggagaatcttaggagggcctttgatcaagtctaagccgcatttgagccatcaagtgatgtaaatggtgagagtggagatgatgataagggaaaaaacatctccggtgtttgcttcatggcgcgtggtaaatcggatatagaagatgaagatcatgaggtaagtgcttttgaagaagctattaatattntaagtgcaaaaaatatgaagtgtgagaagatgtatagaaaacaggaatttgtcattgagtctcttaaatctgagattgatagaataaaatctcttattcctaatgatgatgatcgctccaaatgtgagggtttaat

SEQ ID NO: 76425 - DNA, 383 bp, Oryza sativa
  unsure (1)..(383): unsure at all n locations
taagctgtctttcttcttcatcctccatgcccatatcatacaagcgctctttcggcggnctcactgatgaatgcagggagtacacctgatgtaagtagggagcagtgcattacggatgtagggaagataggagcatcgtctgactgatgtagaaagcgacaccagtgagtgattgaagtaaggagcggcactgacgcatgatcggtgataatgcacgccacatgtgtagtggcatatcggcggacggtggctcgatctggaagtttccttctcgatctggacacgagagatggaattgtggcggcgtggagcgatgggaaacatggagagatcaagagaaagaaagagatcagtgtgatgcgtgtgtgctatgactaaagcct

SEQ ID NO: 76426 - DNA, 182 bp, Oryza sativa
  unsure (1)..(182): unsure at all n locations
gcttcttgcacggcagatccggcggcggtgacaacttgttatggatgatgttgctgntgntgcgctgctgtgaccatgattatgatctaaagttcattgtggattgatctaatggttcaaagcggttgattttgggggccaaacacggtggatgtgctcggtgccccccctgtttttcattc

SEQ ID NO: 76427 - DNA, 156 bp, Oryza sativa
aagccggaagccagcttgtgggatacacaagcttacagcgtaaggcaacttacaacttacagtgtgagccatcaaccttctctggctataaatacgatcctaaaggtccaaggtgatatcgactgctcttcgacacttactgccttccatcctata

SEQ ID NO: 76428 - DNA, 340 bp, Oryza sativa
  unsure (1)..(340): unsure at all n locations
atcttaagtgactgagctgcagcttatgaaaggagaataaaatctttatcacttacatgtgagatggttcagtcctacagactttattttatgataaactagttgggtggcccgcgcagttgcggggctagtaacatacaaaattatattttttaatatgactttacttaaaatttattaaaatagtatcatggtgtcttaagactttgaaagatcaaaccatatcatcctttatttgtttgctcgatctaccactgttcctatttattnttcttggaacctttaaaaattgagagaatctcttatatgccactnaaaattggcccgatcccttatatgt

SEQ ID NO: 76429 - DNA, 392 bp, Oryza sativa
  unsure (1)..(392): unsure at all n locations
tgaaagggtcctagcgtccaatgacccatcgtcatgcatgcagccatatggaaaactgattaccagttatggaagctgacgacgacacattgatctctcactagccgcccatttactctgccattcatgcacgatgtctaacctttgtccaaaaagaattgatatccataattccatatgatatgagctgacacagtgacaacactgaatcactgcccactntgaacagcctatataaagcactgcaagaagcaatgcgagtagacatcgagtcctatcacaagtgcataagtaaaagatcaattacaattcgatcgattggacatggagtacgctactcgtggagatcgcacagctagctggctgaagttactctgcaatatcgtcgttct

SEQ ID NO: 76430 - DNA, 333 bp, Oryza sativa
gcttaacaactcacaaccggctgttgagtccaccaattggtctattcgaggaagaggaaagtgatccttatgacacgccttgttaaggtcggtgaagtcaacacacattctccatttcccgttggccttgtgcaccatgaccggattggctatccactctggatggagaacgtctctgatgaaaccagctttgagaagcttgtcgagctcttctcgtatggcttgtttccggtctggtgcaaatctccgcagtttttgttttacaggcttggcatcaggtcgcaccatgagtttgtgcttaatcacctccctggggacccccggcatgtcgga

SEQ ID NO: 76431 - DNA, 423 bp, Oryza sativa
  unsure (1)..(423): unsure at all n locations
catgtgttagcgctagcctggtaattacattaatgctgcgccgttgacatgctgaccccacatgtcaacctatatgaccgctgtagaccgtgtacacagagactgtccacgggtcgactgaagctgaccccgtgtgtcaaccgatgcgagtggccaacaaacggactccactatacaccacacgggatgcacacgtataaaccacgcggctaccgagcgggcacactaacacggacaccacacgcacaagcgaacgactaccgacaccggcacactggtaccggtgtcgacaaccgcacaacgggtacggtgcgacaccgaaaggactatggcggngaatctagatgacggatccttaccaccacgcgacgaggcgtgggaacgccaacgacgaacgggcgcggctgagacagactggcacaa

SEQ ID NO: 76432 - DNA, 376 bp, Oryza sativa
  unsure (1)..(376): unsure at all n locations
agcttctcaaccagggggtcgaatattctccagccctcttgcaagaaaattggcagaagataacaatgtagtttttttttcgtgttacctatctaagctattaattggtagattttattgaatcatacttaataaacacaaaacaagttccactgtcaagcgtaatgggaactggtcctgatgggcgaattttgaaggcggacattgaagattacttgggtatgccctttctcttgtcccctccaccccccttctctctctctttctcctcccttaatgatgaaatctgcgtggaaaaatgcaattaactagttntatatatttaccaatgactatagattaatttattttcaactatatcacttnctagattttt

SEQ ID NO: 76433 - DNA, 450 bp, Oryza sativa
tttctcatcttgtctaacactgacattcttgaattcttcactgagtgaaaagagccgacatatctcaatatcacccattgtaggcttcaggtactcattgtaagttgaaatagtcccgtggctaatatagtaataactagcaatccttcctatgtcagtaacctggaagtatcctgttttcctgtcatactttatcaaattgttcctatcgagcagatttgcagcagagtgcacctgcagaagcacagaagtacaagaatcaacaattgattgagcatggactataaggggtaacatagcagttaaacatcaagagagcatacagagaaaccatacaatatgaacaacacaagcatgaatcaattgtcaactagatgcttcagctatggaattcagccaacaaaaataatgagttgaagttgcgcactttttacgcattttttacatgct

SEQ ID NO: 76434 - DNA, 336 bp, Oryza sativa
  unsure (1)..(336): unsure at all n locations
agctttccatacatgcgaactaataactatcatcaaaagttttagaanaatacacatgttttccaatattattatatctatgtgcaaaggttcatctttaattttattatatttaaatcggaaaaaagataaatttctgacacattaattcgtacatttaaaacgggtaagattttcatctttttttttgttggcatgggcaaaatgtaatgaatttaaaggtcatactacatatatgtataatattattaaaagtacggacatgtacattttttaaaagattnttcagntatacttattacttcctccatattttaatggatgacgccggtgact

SEQ ID NO: 76435 - DNA, 389 bp, Oryza sativa
  unsure (1)..(389): unsure at all n locations
tacccggacaagccttcagtggcatacaccctngggaatctcatcaatcaagccttntgcaaacataggttgtgtctgcacacggactttcaccgattcaaatgggcagatggcaacatcaactatgatttgagcagatgcactgctaataaagtaaatggtgctcttatttctgtccactagcacatcagagtacttcttcttgaaatactcataaagaccaaacttgcatccaccttggaaaccatatccaaagaatttccctgcccaacccctccaaagagatgaagctccctcttcttttacaagaatgttcagtcccgaaaatatgctattgtacttcatgggattcacctgccacaacaattaaagggaagtagtaactatta

SEQ ID NO: 76436 - DNA, 432 bp, Oryza sativa
  unsure (1)..(432): unsure at all n locations
actactggtcatctccctctcgatatatctagctatcatctttcctaagcagcataaacatacaagccgggattgctagatccacagaactattaacttgtatatgtgcataaacatctgagacagatcagagagaaagagagagggagatgacaaaatgtgtaagtggtggataggtatagtaataacgcaagtaatgttgcatggtgatgtctttagagctatagcttaaactactacccttctgctactccaagagaaagcgatgtttggggattatataggcggngcaagagatgagaggaggggggtcgggactagcttatctactctctccgtcctaaaatatagctatttttagcacagtgtcttgtcctanaatgaagctatttcttcacctacctactcctctcaatcaatcacaaccattct

SEQ ID NO: 76437 - DNA, 398 bp, Oryza sativa
gcttgtgtgcatatgatatattcccttatcccccttataatagttccaaatccccagtttaactgtatgattgttgctgggaactggcgatcctgctgtcactgggaaatgcttttttcttagagacctcccattttagatgttttcaattttttactctatttgctttgtatgtcgaaatctgttgaaattgtaactaaaaacgagaaaataaaatgaaatgtgacaaggactgagcttggtaactgcctcctaccaggccctgtcccaagaaacttgtcctgaaggggccttgctgtcttgaaaacttgttctaggtgaacatcattatatttgttgtaactgttatgtacgtgcaaaactatatatgtattctcttatgtcttttaagggaaatg

SEQ ID NO: 76438 - DNA, 408 bp, Oryza sativa
tgtctgggtctctggcaagaacaagatatggcaatccatttagcttcagttactagattaatgcaagattatcttcatgaaaaagccggtgcatgcaaacttgtcggattggaagaggagcagccacaagaatcaaattacggagaaatacaagtttttattcagaattaatggaagtgatgaatcaatcctagataataataataataaaaagataatcaaacaagctcctctgatcgtggcacaaatgggagcagcagtagcataaaccaatggaggaagaacagctcatatccgtaacgaattcctacacgcacgcgtgccatgctcacatcacatcgaaatcctcatatgcgtgcaccgatcaagattgatacagacggtgatatgctttgccggttcgtcgtc

SEQ ID NO: 76439 - DNA, 383 bp, Oryza sativa
agctttctagcctatagtgggtctctatgttcaacatttgcataaagctaattttattgagcaattaatgagtaaaataagccaggacaagtaaatctagcatcattttaatttatggacagcaagtatataattctgaaatgtataagcaaatgagcccaaaacggcgctctcatcatcaaccatggactaccaaagtccataccaacatggcacaacatgccaacaccaccatcaaacataatcccatccataataatccacatttgatgctaacataactgactaacacatcaagcattgtccataactaaagacgcggctattcgaatagattatactctgaccagaggtgtacaactggacccacacgaaatgaacaa

SEQ ID NO: 76440 - DNA, 454 bp, Oryza sativa
  unsure (1)..(454): unsure at all n locations
tgcagagttatatatggcaagagttgtatgtttacatggtgttccaaggaaaatagtgtcagacagaggtagtcagtttacttcaaagttgtggcagaaactacaagaagagatgggtactcgtttgaatttcagtactgcttatcaccctcaaactgatggtcagacagaaagagtgaatcaaatnttataagacatgttgagagcctgtgttctatatttcagtggaagttaggataagaatctgccgtacgctgaattctcttataacaatggttatcaagctagtcttcaaatggcttcatatgaagcattgtatggtcggaagtgtcgtacaccgctcctttgggatcaaaccagtgagcgtcaagtttttgggacagatatattgcgagaggcagagganaaagtgaagattatccaagatagggtgcgtactggccagtcgcgtcat

SEQ ID NO: 76441 - DNA, 87 bp, Oryza sativa
aaccgagaatcagctcattcgacaaataactgattttttgctctcagcttctctgctatctcaatggacatagccagcactgactga

SEQ ID NO: 76442 - DNA, 446 bp, Oryza sativa
  unsure (1)..(446): unsure at all n locations
agcgcaagctctcttcttatcttccaagatttgattgactcgctcggtctgaccatcagtttgcgggtgataggccgtgctgaaatttaaatgggtccccaattcttcctgcagcttctgccagaattttgatgtgaactgactcccttgatcagatacaatcttcttgggtaccccatgcaaacacatgatccttgccaggtacaactctgccaacttctttcccgtataggtggtatgcactggtatgaagtgagcaaccttagtgagtcgatccacgactacccatattgaatcgtgacctgatgatgtccggtgcagtcctggtataaaatccattccattntcctcccatttccattcacggatttgaagaggttggagtaaacctgctggcctttgatgctccgccttcactcgctggcaaacatcgcagagtgcgacat

SEQ ID NO: 76443 - DNA, 340 bp, Oryza sativa
  unsure (1)..(340): unsure at all n locations
agcttgatcaccacactgggctacagnttcgtcagtttgtgcttggtccaaagtcttactggtgcaacttgctggttatctataaacttactggaaggctcactgcactatgatgccatactttgttaagtacaattagctaattcaaatatgtttcatgtgacattactattcaaccattagtaatttacaggtggtgttgattttacttcaagtacctaaataaaattgacaataacgcatcgctcttctgcatatgtgtggtgttcaacagctgattgttgcttgcttccttctttcaggcactgangaagaagctgcagaagcttatgacatcgcg

SEQ ID NO: 76444 - DNA, 449 bp, Oryza sativa
  unsure (1)..(449): unsure at all n locations
ngagttgcaactatgaacattatcatgctgccctgaatgcttatcgaagaaataaaaatatgacaaactgtcatatctatgtccttaacgatttgtcagtgctaaaaaataaattacagcaaatacaccccaaattaactatttaaaattttaaactttggcaatggcttataaggccacgttgaaaatctgaccccatgcctccttactagccccgtttttcatttccatatttgctctcactctcctttcaagaatcaaaaggagaactgacaaatcaaaaggaaaaaaactggtacaggcataaaaaatacaaaaggatgaaagtacttgatcaaaacatgaaaaccaaaacgtttagtaagcaaaaaaataaaagtaaaaaaatagtaatcaaaatttataattaaataaccttgaaaaaaagggaatttggacccaaaaaacac

SEQ ID NO: 76445 - DNA, 365 bp, Oryza sativa
  unsure (1)..(365): unsure at all n locations
agttttcctttccaactgcttaaatgcttttcatagcgttgtacatacctcctttcctatcggcatgtcttaatctcctataatgaatagggatacccaaataccgaaatggatattgaccaatggaacaaccaaagagttccatgtgttcgntttcaaaatctttcgcttcaccaaagcaatataattcactctcatggaaatgtatcttatgacccgataatcgctcaaagacaaaaagcaacatcttcatgttacgagctttttctatgtcatgatccataaagagaaccatatcatcggcatattgcaaggtagagagaccatcactaattagatgtggtactactcctgcagtttgacca

SEQ ID NO: 76446 - DNA, 467 bp, Oryza sativa
  unsure (1)..(467): unsure at all n locations
ctaagctggctttgccgtagtgtacacaatcataagtcgaaggctcaagaactctctgaaatataacctttgccaactgggtattgggtaacatgagctggatattggaattttctttttacaactatgatattgtgggttgatttatcttcataaccctacacatgactcaatgccaatggcaaagctagccgataatatcagcggggttagtttcattatatgccatagtaaaccttaatactagaaggtttttgtcggctaacctcaatgaaaagggctaactctaccatgacacanatgaataatttctcaattatagtctattggaacatgtatgatcggatcaactcccctccctatcatgatgcctccagaagtggctctctctgccacaattctttccatgtatagcttagtactctctctcataaaaaaaccaacttctgtagaaagtgaattttcat

SEQ ID NO: 76447 - DNA, 476 bp, Oryza sativa
  unsure (1)..(476): unsure at all n locations
taacatacaaagatgtcacatcatcatccactaacaagattcctcttcatcatccacttattaacaagatgccacatcatcatccactaacaatcatcacatttaaacatcatgcaaacatgctatatctttatatgttttataatttaaaaacttttcaaatacaaacatgttaaattatcatccaacataattcacataatgtttcaatgtatatctttattatgttttatgatatcctatatacttatatagttcatcctcacttagttagtgcttaaatgattaatctatggtccaaaatatctttttccttgtttcctctaattaagtcatatcacatcaattgttgttagcccttagatgattaatctacggtctaaactatctccctacttttcttcttacatacaatcataccaccttacttttacgctgaatcactattctacatactgattaaaattanattatca

SEQ ID NO: 76448 - DNA, 451 bp, Oryza sativa
  unsure (1)..(451): unsure at all n locations
gcttacaaacttcattagagagtcagagatgacaatcaggatattcccagctgagtgtttaacataactgctacagaaaccaaagaagccaacctgaaaaggatgatgtcatatactaacaaagtaagctgttgaagaaaaaaagcatgagggtacgaaatgtaataaaacagtatacagtcaccacaattgtcaataatatctaattctgaagcagtatacgtagtttaaaatttttgtggagccacagtttcaacaacttcctctgggtaattntgttggtattttttcatgcctcccttttctattggtaagagtggatgacacattaacactacttacggatcaaatgacatgattcaaagttggtgatagagacccacaggtgatcgggataacgcctatgccctacttatatatcctgatgccaatatgcctgaacaaatgtaaa

SEQ ID NO: 76449 - DNA, 470 bp, Oryza sativa
  unsure (1)..(470): unsure at all n locations
ngctgatcctcctctggtgcaccaccgcgcatcgtcgtctccggcatcatcattctcctcaaccagtgtggtttccccacagtatcttggggacatgtggagccccaattgcatgaaagaagcaactctcgactcccggttgatcaacccgtttcgcgtcgaggggcagaaagagttcagtggaccgtacaacaccatggttgaagttccatcgatttcccgtgatcgtcgaagattaagagaagtagaagatttgctccaaacttacaagtgagtggttcttgaaaatggttcacgttgcttttttactctcaatcctcaagtgggttcagtactctgaactgtgatatctgtagtactatacacttataattagcattggttcttcanggtaaatntgtatcggntggagaccatcgatctgagatgaaatgacaatgatgaaaagatggctttctggatcaacatac

SEQ ID NO: 76450 - DNA, 372 bp, Oryza sativa
agcttgtatattgtgaataaagaaatttccaaagtattgggcatacgccatgcgcacactgctttaacagatgtgcttaagtccctagaagacacatggtttcaccacacctggaaatatatggcatatgtggtgtaaaatccgagtaaataaactcataaaggatttaccaaccacctataaaatgaccacaatatataatcagcctaagccataatattggtcaataaaaatgcacacttacgtggcgaaaagcaatgatattgtatctaatcaattgcttaaaaacccaaacagcaccttgacttatatataaaaaagtcagcgggacagctatataaagctttactgtttgacaccttttaagatgca

SEQ ID NO: 76451 - DNA, 471 bp, Oryza sativa
  unsure (1)..(471): unsure at all n locations
tcctaaatgcatcggaattccaaggtatttaaaaggaaaggtacctaacttacaaccaaaaatatcataatattgttcataacattcctttgtctgaccaaagcaaaataattcactcttgtgaaaatntatttttaggccagataacttttcaaataccgataaaatcagtttcaaattctttgcctgttgcaagtcatgttccaagaagataatagtatcatttgcgtattgcaagatagacaaaccatcatcaacaaaatgaggaataaccccattcaagagtcccgcctctntagccctcttaatcaatagagtaagcatgtcagctactatattaaaaagaataggagataaaggatccccttgcctaagacctttgtaagtttgaaaacaattaccaatttgatcgttaacttttataccaacatgaccaccttgaacaatagaagctatccattcacaccatct

SEQ ID NO: 76452 - DNA, 293 bp, Oryza sativa
agcttcctctgaatataaatttctggggtttttgtgggaggataaagaatttcagcacgtttataatcctagatgtaacagtttatgtactactaaatgtaagtttaattcgtattgcattttgtattatgataatctgtggggaacgttctgaatatcatcttgcagaaatgtctcaagtgaaaataaaataaatggagataataggacaattggtggcaaataacacatcatttcaaaacgacggataaggttgcccatccaattgggagcagttagatttactgtaaaac

SEQ ID NO: 76453 - DNA, 443 bp, Oryza sativa
  unsure (1)..(443): unsure at all n locations
ttgctcctctgcaaatgtgcatatgggccgaagcccgtttgcttattccccgcggcagacctgtgaatgggccgggtctgatcgggccgcgtaaataaaaacccattctttacgggccgaatatacgtgcccaagtccggcccgtgaatgtattatgacaaccagttttgggccatgagcatgccgggcctgctgccttcctggttacctgtcaaaataaggctgcattcggtagatgcagttgggaacaaatcctcctgcatacaaaatggagcggtccattagcgcgtgattaaataagtatttgttattttctctctaataatggattaatataattgttaaagcaactttcgtatatgttctttnttgcaaaaaaatgcatcatgtagcagtttgaataacgtgcacgtagaaaatgagatgattgactcgcgaaactc

SEQ ID NO: 76454 - DNA, 357 bp, Oryza sativa
  unsure (1)..(357): unsure at all n locations
agcttgaggctcgacttggcttgacttccgaacagacatgaagctgacggctggtcatctatgtgtgacaactaaaagaattggagagactgggaggagaattttgaaaaaccgtttcgcaaagaaaagccgaagggcgaggggagacattntgcaaatatggttttcagaaagcttgtccttatggtttgcccatttggctcaacctacagtcgagttggctctgataccactttgtcacgcccagaaatttatcccaaatttccagactattttgtgtattaaatccctgtccaggaccagccagggtacacaaaacgacatgttatatacagttccaaacgttaataaagcgta

SEQ ID NO: 76455 - DNA, 472 bp, Oryza sativa
taactacatgatcgtggttgacgcgacatagtataagtttcttctgtccaaattacattctcctgctttcatccatccctttgcatctttttattgcaacaggaatgctttctataaatccctttgtaactgtcccttgtcctccttctccaatgatttgattcttgtcaaagtcatttgttgctacctcaattgtcttctgtctgtacaacgtaaattcaaagttgcagtcgattttcatcatatcagacataagctggcactcatgttgttgaaaatactcgtccctctgtcttataagacgactgtctttgatacttcgcctgtgaatgatcacttgcattccaagaagagcaataagaacagtttaaataaaagaacaaatgcctgcatgaatgataacatcagtccattacttgggatctataagcaaaagtttaggagttaacaacaccacgaatggctgtgagat

SEQ ID NO: 76456 - DNA, 146 bp, Oryza sativa
  unsure (1)..(146): unsure at all n locations
acagacagacagacagattgagagatggatngatngatggattgattgagagagagagagagagagagagagatttcngtnctgaaactaagacacgcttactagttgaaatggacanataaatttaccaaaaacttctccccttt

SEQ ID NO: 76457 - DNA, 430 bp, Oryza sativa
tacctgtaaagtgagaaattgcaggtgatcaaggtaacaccatctcactgcgtcgtcgaggtgtccaaatcaactggggatctgagatcatacaaagaggtttgttagtgttatgtttttgtttcagatcaatttggctccacctcatgatagtacgatgcacaatttactgaacggaaatgcaatgcatatgatgtcaacttgcagttctgtagaagcctatcaagcttgctcaatggtggacagctgtctgcaagctcatctgatatggagtgtgattaatcaagttatgttctatgagtagatgaatcaatgaatcttcaattatcacaaactcatggagttcatgagcaaacaagagtgcctaccgggcaactggtgagtggtgacctgaaaaaaatgtgatgataaacaggactaaagtcattca

SEQ ID NO: 76458 - DNA, 345 bp, Oryza sativa
  unsure (1)..(345): unsure at all n locations
agcttcggcttcatacaactgcaggtacattcaccatccgccttcaagacacattcctgcacggcttgcttgcgatagataccacgcctgctcctatcaacacacattatttcataccgatgcacttgtgtgccttgagcaacaactctatgtctccgtgcctttntgattntatcttccatgtactttgtcactacgttgccaaacactatgttgttatcggccatggacggaccaattttcttgtatcgatccctaaagtacgcttgcgtgccgtgaaggatgaattcaacaatagcaaccaatggaagtacccgaactcctcgcattacccagttgtacacc

SEQ ID NO: 76459 - DNA, 430 bp, Oryza sativa
  unsure (1)..(430): unsure at all n locations
ngcattatacacttaattcccatggcttgctgagttcccttgtactcacccttgctctatataaatatccccccccagttgctgtagaagatgaagcagatcctgctgatgaggagttcttccaggagcaagccggctacgatgagttttaaggtttcggcctagttcccaagtcgcgcctgtgattgtttggtccaagtcctggcttacgctttccttttgtaatgcagttgtgagctcgggatctgtccgcagcccaacatgactgtacttctactctataataaagagacttctgttgctgtgatattctgtctccctgtgataccagcactgtttcctgagactggtatcgattaacaggttatgttggagcgtcacgggttatttccggtcgtgactagctcggtgcgtgacagttgtggtgtga

SEQ ID NO: 76460 - DNA, 325 bp, Oryza sativa
agcttgtcgcccatcatgccctggctgacttctaggacggtgacgaggtcgatgggggcgcgcgtggatggcgatgagcgcatggcgggcgccttcaccctcacgggcaccacgtacttgccgtgcctccgcccagcggacacaatggcggcgttcggtgcgagggtgactgccatcccgctcctggggcgcgccgggaagaagcccctgaactcggtggcgtcgtcctcgtcgtcctcggggatagggttgaaagcgccggcggcggccttgggcgcgaggaggggctcgtcgtcgtcgtaagacttgcgcttgtggtcgtcgg

SEQ ID NO: 76461 - DNA, 433 bp, Oryza sativa
tcatgatggagatgtgccagagttggtggatccacgtttgtttggcgacttcaatttataagatgctgaaagggtttgcaaagttgcttgttggtgcattcaagataatgagttcgatcggccgacaatgggtgaagtggtcctggttcttgaaggtctacaggagtttgatatgccccctatgccatgactacttgcagctataacgagatcttctaatgtagctgagatgtaaaaacaattcaaaatcctctaattgctaaaatgtactgtataatgctactcttgtatttacatttttttttctttaatgacagacttttgttagcaacggttgtcgatgcacagtgagaaatgtgtttttgttgacggtatagttgacataatgcttaaattgaaataggaagtcggtatattggactgcttactgctt

SEQ ID NO: 76462 - DNA, 345 bp, Oryza sativa
atgattctttccggcgtattctgatgatattatagaaagaaaacaaattagctacatccctgattgacatgtgtgtttgtgaaagatctctcgagaagggtcagtatacatatggatgaaacgatttaccttttcaagttccagagttagcttctccagttttggtgcgttctgaaggaagacaaccaatccatagaagttcgcatccaaacaccattgaccaagagtcaggctgacaagattggtgaattttgggtacaattgcaaattgttttccattgtcagctgcacgatactgaaatgattatgttgcaacagaaaacccttgccatgttatatacaaaa

SEQ ID NO: 76463 - DNA, 472 bp, Oryza sativa
tctagaagtggcagtgaagaggaacacgagagagtaagattattattgagatcgacgaggttcaaccgaaccaagccgtcgtcgtcgtcgtcgtggccgaagccgtcgatgaatctgttcgttgcttgaagttctcctgctactgccttttgtattcatctcctttgtttgtttgggccttggcatggattatcaattgagtcagcccatgtgtagctcaatgggttcctgacaatctcctctccttgaaattcgacttgtccacaagtcgatgacaagtaaattgcagaaatggcaaacctccactttgatttctccagtattcttgcatcgttccaaaagcttcatcaatgtccaatttgttttcagcttgccaacagaaaacttgcgtctcataagaacagctcatgcaaatcctggcacttcgcatgtgatagagagaagaactgtctcgaaatgagaatttgactga

SEQ ID NO: 76464 - DNA, 292 bp, Oryza sativa
tatattcataataactgttcagatttaagtaagccggatactgctgactgccaagagcattttacaggtctgaactaaagctgtgcaggactcatttttctgactatttcgatttgaactttggactttgttcaaaaaatatggcatgtggaatggctccttgatctacttgtattatgggcactgtcaagtattggtgagaatacaagagcaacaactttgtggaatcacttatgcaagggcagatacattaaacttttcttcagggaacacaagactctggtattaatac

SEQ ID NO: 76465 - DNA, 417 bp, Oryza sativa
  unsure (1)..(417): unsure at all n locations
ctctaatttattcatacctctactatttctatcangatccatccctggtagtcatggaatcgatcatcttgcttctgtgaaatcaatttgttgatttatccgtgatgatgaacaatcgtcaaatgtaaccaataaaaatggttgagttgatgtttgtaaaattgtggtgaaattggtaaagtgtcagaacactggggttcttactaatacaaggtaagttcgatttataccatatcagtgagtattgtctgcagtactacacgttcagtatcaaccgctgatatgtgggattgggtccacctatcagccactgctactgtagatgcagtactaatgcctttcacagtgcaacaccgtggaccggtgctccagctcgacacgtcggattcgagcttgtgtggcgtcagggtccgctcc

SEQ ID NO: 76466 - DNA, 314 bp, Oryza sativa
aaagaagaatctacttcaaccgatatgcccttatgcacggccatacataacatataaatcacacgtggaaggggtgggcaattatctaaagcaacaggtgctgtaacgaaactgattgcaaaagaaagaaatcggccactttaagattaccatctggggaggtccggttggtatcccaaaactgcttatcaacaatcggacaagtgggtaatgttggggtgaaccaaaaaagtttgggtagagccgggtctaagtgttggctaggtaaacgccccgtaataagaggggtagttatgaaccctgtggaccacccc

SEQ ID NO: 76467 - DNA, 466 bp, Oryza sativa
  unsure (1)..(466): unsure at all n locations
ttctggcatcgagctatttggccgcatgacctctccttcagtatcgtcaccgcagttgaggttaaccaccaaattccggatggattggtgtggttcctctacgcctatgacaccacaatatcgtaccatgaacgaagaaaggcatgagagaaatattggctagtaattgtgaagccccaattcttgactggaatggacaccatatgcctctgccctccctctctatctatccaagagatggaagggcagagcttttttttggttttttcatcttttcatcaaagagttgaacaatgaagatagatggcaagtgcctgatcgatttgatcaggtcgtgtatgaacaaggttcanatcgttcgttcgttatgatgcctcagctgcatacatcactgcactttcacttgacacctatntaaacggctcgtctcgccgctaccttatactatatccatgcttctgtcgct

SEQ ID NO: 76468 - DNA, 342 bp, Oryza sativa
  unsure (1)..(342): unsure at all n locations
agattgaatttgaatccatctgccctggcttgaaggtgaacatgattttatttttaagattgcattttagttactcttaacatactccagttactcaatcatatacatatctggttcacacatgatctatttatgcacttttgtcgcgtttagtctaaaacgatgctgtcaaattttaaaagggcattgctttactaaattgtggtggatgtagtattagcatgtcaaattacatttatgcgtttcttgcttcccgaccatatgtcaaataactgaaagtgttagtacttggagtaaccctttnttcatacttatgccatatagcaccctaattttgttcat

SEQ ID NO: 76469 - DNA, 180 bp, Oryza sativa
atcacctccctaaggaccccgggcatgtctgccggtctccatgcgaaaacgtcggcgtttgcccgcatgaaggagacgagcgcgtcttcctatttgtcatccataagaccaccgattcgtgtggtcttggacgggccgtcgcccatggcaacctccttgaccgggacctcgttgcacgtg

SEQ ID NO: 76470 - DNA, 288 bp, Oryza sativa
tatatgtgtttatggaagtaaaagaattacacattaccaccatattttcatcaatgctagctgctatttgggtgctttcgagaaacttagcaagcaataatataattcatcttaaaattggattttactataatcatattgcagttggcttatttgtggattgacaatccaagattgtgtgtggccatgtttaccaaataaatcaacatggcatcaacctttatagataactcctcacatgacacatgttttatgtgattaaaaaaagataatgactcgtttgagtat

SEQ ID NO: 76471 - DNA, 240 bp, Oryza sativa
  unsure (1)..(240): unsure at all n locations
taccccatcatcttatttctgagtttattcttctgatataactgggggaggcaatcaagaagcattcttctatgttccatattactaaagaaagatgtaatattttcatctttcttcacgtcttaacaatccgtaatacaataagtacattntgagatgagnaagaatccaaagtaaaaattgaaaagaagagtacaagtctagaagacctattcagctaatcaataatcacttacccct

SEQ ID NO: 76472 - DNA, 448 bp, Oryza sativa
  unsure (1)..(448): unsure at all n locations
tctaatgagcctaacaatatatggttntattgtttatttaacaaactaggagatcaaatatgctatttttatgtatccacaccataagtagcttctattggcatcatatatttatcttattctttttctcctctttctttattgtgataaactagaaattaattactttcctagataattatccttgaaatatacatatatagttctatttacatgttgagctcatcagtagtcaagctcaaaccatgcctgtctagtagtagctcgatgcatggttacacaagcttggctcaaccttatgtcgagcttgagcctatgccagcaagatcgcttgagctcggctcatcgacagccctacacacgatgtttaatgcaaatctanngttatgtgatatacgatatctgtctaatcgataatcagatctgttctcgtaatgtgaatgctcat

SEQ ID NO: 76473 - DNA, 306 bp, Oryza sativa
agcttaatatacttaaatgcaataagatcttgacataaagggcggatttaacatgtcactgaagcatatagagcgaatatggttaaatcagataagatcggctgaaactccgatactaccctaatcggcaaccaaaaggcaggctagagattgatattctaaacacgacttaatagatcaaactcaactgatgcagcattaagtatgaaaagaagaacaatatctagacaatcaagccgctggaagtttcatagagtggtggatatcttatataatctaaatcaacatcaaaatctaacctaatcg

SEQ ID NO: 76474 - DNA, 469 bp, Oryza sativa
tggactatggacccacatatggtagcccagtgacctattcttcacaggactactactgagcaagtctgggagtgcccggtctcatctctgggcacactccaatgtggaccatgccggataaacattgcttatgatcagcttctcgtcgttcgacatgttaactttcttctttagtaggtgtgaatctaagtaaaatcatgtgctctatatggtttagacgagtgattataatcgtaaacccttattgccgaatgtcccgaatgtcgcgttcctcacacatttctgccgaatgcaaaacatcaacaatatgatatacacaatctagtgcgttaagttatggtaggaaccacttcttgacggaatcatagttactggtacactattgagacttaaacacacaatatcatcactgctcaacatgagtataagtgatgtgtctatggtatacaagatgagtatgttatttcga

SEQ ID NO: 76475 - DNA, 425 bp, Oryza sativa
agcttcatccttagttgccataaagaaaacccaagaatatcgagaaaaatcgtcaacaataaccaacacataccactttcctccaacagattgcactctagctggaccaacagtgtccatatgtaatagctgtcccggtgcatctgtcatcacaaaaacaatatgagcatgtgaagtagaaaccatcttagcatgacgacacggtgtacaaaccaaatcatgatctttcttaagtttagacaaaccacgaacaagatccaaaccacttaatctagtgagatgatcaaaaccaacatgtccaagtctacgatgccaaaacatcacatctttattaaacttagcaacccaacatgttatcacaggtgaaacagaattttcaaatcagctttaacactcttcatagcgagaaatattcacacagaatc

SEQ ID NO: 76476 - DNA, 430 bp, Oryza sativa
cgtgttgacaatacaaacttaccatacagagtatggttattgtttggcatccactgacctgttggctccattgaatgttgtgttccctaatgccactcagtcctattgaggtagtgctcgacatcatgatgagattggtttaatagggaagaagggaatgactaagactagaacaggtgctcatttctctttatcgaaaagaaaacaaaatatgggtgttgaaacagaacatcggggaaaattatatatgtaagcatctataggacaaagtggttgaatcatcaacaactttccaaaccaataaagtgtgtctgattttgtctaatgtcactgctattcataagatgtcagtgagtcaaatggagaacgtatgtggtggatatttgttcttggaaattatcagtcataagagataactacagagaatcac

SEQ ID NO: 76477 - DNA, 367 bp, Oryza sativa
agcttgtcaatagatcggcaatgttcatttggcgcatatcgctatattgaatcctatcatcaaaccatgaccgttccgaggtaaggctttggatttcattggtcagatttatccttcattatcaaaagggcattatttcgtgctaattgcaatggattacttcattaagtgggccgaagccgtgccgctcgacaatattacttgtacgaatgtaattgactttattttgaagcatattggtcatagattcggtattccttaaactttgatcgaggagcttcttttatgtctaaagaggtgagaggttctgccgaattttatgatattaaagtgttgaagtcttttctctactacgctcgggcttatg

SEQ ID NO: 76478 - DNA, 431 bp, Oryza sativa
gtccacccaaacaagcagatccgactcctcctcaacatacaaactcatggacgtggtgagggagccttatgcaccacctctccaccaaaaccaaacgcctaactagttgtcataagaaccttcaaagcctaatggccactcattctccacaaagtaaaacccatccaatcgaaccaacatcttaccccttgtaatggaactccctgcgaccggagtctggaaatagatccgacaaaagagggggaggagctctatgcaacgagagaagaaccagccggtcggaggggatccctcaccgtcgaccagagaacaccatccacaccattgtccgctttccggcgaacaatctgcatcggcgcttacccctcttcagcagtctatcctgcttatttgggcactaaattcatcccaatgtctggtctctccatgcg

SEQ ID NO: 76479 - DNA, 459 bp, Oryza sativa
  unsure (1)..(459): unsure at all n locations
agcttgtgtttcgtgcgcaagagaaaagatagtgtgtgtggaatcccttgagtgttattggctagaagttcggtaacaatgccaagccttggtgtcagggtcttgacgctaaccccttgntacatcagtctctagcatgactcgactgtcgtcagtactgtgatttaacatcaggccaggtctatagtatcgacaaatttaacctcgctgccaattaacttggctcagagttaagtatttgttttcgtaatacgttctgtagaggtatatttgtaaaataagtttgacaaaagaactacggccgagtttagttccaaattttttcgttaaactttcaactttttcgntacatcaaaactcttctacacacacaaacttctaacttttctattacatcggttcaatttcaaccaaacttccaattttaacgtgaactaaacacaccgtaccactcttaca

SEQ ID NO: 76480 - DNA, 294 bp, Oryza sativa
  unsure (1)..(294): unsure at all n locations
tctcgatcatatcgcttcttgctgttgcagttgcacacgcggctgtttgctgcacgacggcgtccctctctgactttccgataggcgagcggcgtatggcgtatggagatgggagggaaaaaaaaatctctgaatgttgcaccaaaagacaaattgggtaaagtcatggatgaaataaattctgtatgtacgaacacctagatgaactgatcatgatgtggattaaactgaaagagctgacggngagtgacacgggaattattgaaggttttntgttgtacaaaattgaatttc

SEQ ID NO: 76481 - DNA, 84 bp, Oryza sativa
aattgtatacattataaaaaaacacgaaatgaactgatcccgaaacaaaaaaagggacataaaaaaccaacaacacccattttt

SEQ ID NO: 76482 - DNA, 179 bp, Oryza sativa
ctacattttcaggcccctccacttggtcttcgccatgacgtgtgcatatttcgtacttgtccataaatccaagagttactatgtgctccttcactttaaaagcatcggcgaagtcccaggctatttcattcttacagtcagcacatggacaaattatcttcctcatattggtcttctca

SEQ ID NO: 76483 - DNA, 289 bp, Oryza sativa
cacaacatatcatactaacgacgaattatttacatatggatgaaaaaaacaagaagccgtatagatgttttctattaagtatatatagatatgtatcccgttcatcccactgccatcttcataagaaaaaatggtactgatcactggtggataaaccctttgtagtcccggttcgtaacccccctttattcccggtttccaaaccgggagtaccaatccgggactaaagatcgctatcgttagtcccgggtgaaataaccgggagtaaagatcgatctttagtcccgga

SEQ ID NO: 76484 - DNA, 436 bp, Oryza sativa
  unsure (1)..(436): unsure at all n locations
agcaaagcagcaacacgattcgcatcgcatctcatgctcatgctcatcgcacattcgcatctctcatgctggcgatggagacgtgcaaatgggatggcttggcttccacgcgcaaaaacaccgatgcaaggctgccttgcacccgattccattcttcttgtgcttctgcggngaagacgaccccaccgacaccctcctcgccgtccgatcgccccaccgacgcctncatcatccaccactctctctctctctctggtcccacccactcgctcgctctctgtgggccccatcgtcgaatagttcgcgccgatgcaaatctcgtcccacacctatccggtatgcactatcaagggcatggttgcaaatatcacatagttgcttcacattgttactaacaagtcangaaaaggcgcggctgtaaatgggaaaaagggga

SEQ ID NO: 76485 - DNA, 401 bp, Oryza sativa
  unsure (1)..(401): unsure at all n locations
tctttgggctgccaagaagagaagggaaatggatcaaagatcacctaatgatgcttcatatgcgatgaatagcgccgaatctcacccgggagcggtgaattgacgacgatggccgtgggncggacttggggaagaagagttcgatctcctcaacggcggcgttttatctcgatcttctttacgcgtccttctccatggacctatgcgacgtcggtggcgcaatggcttggtcagcggatgctctagtcgaccggaacggcgaattgtgcgacggcggcgctctggacactgagagcggcgtctagcttggcacaacgtgttaagagacatgatngatcatgtatgggaatngaatcacatttacatggttggaatgcggcgaagctcaccagagaagattt

SEQ ID NO: 76486 - DNA, 311 bp, Oryza sativa
  unsure (1)..(311): unsure at all n locations
agctctgccgtgacgcgtctcatgtgttgggacgaggctcatgtgttgggcaatcgcggagtgcgggtaaagtgtacatccactgcagtgtgagtaaaccaaatctattcgaatatccgtgctcgcggttattgagcaccgggacatgtattacacttggctagactctaaattcttaacttgtggnggatgggatattgcatgatgaattttatgctgagggagtcacttcccgagaggagggaaggtggacatcctcagaataccatgacgattcaatggcgggaagctatccttgggatcacaatgga

SEQ ID NO: 76487 - DNA, 374 bp, Oryza sativa
  unsure (1)..(374): unsure at all n locations
cgcccgcatgtacaccgaacacacacttatctgtgtttatttntatgcgggcggagcggagactctcaaaagtttccgctagatctgtgagtaacgtttcctggttgtgcgtctttacaaccaagtcatcgacataagcctcaacattacgtcctaattggctacccaaagaaattcgagtagtacgttgaaaagtatgacctgcattctttaacccgaatggcattgtcgtataacaatatgttcctatggtggtaatgaacgcagttntttcctcatcctccctatccatgcgaatctgatggtaaccagagtatgcatctataatacacataatgtcgcaccccgcagtggagtcgacaatctgatctatg

SEQ ID NO: 76488 - DNA, 377 bp, Oryza sativa
gcttcaacatagatagtacgagacaaactaacggtagcaaaccttaatattttgcataccaatgcaacaatctaaccagatttcccagcataaacttgaacaccatccatttcagtctgcaggctaagcaatgaagcaactccatttccttcctcaaaacaaccggaggcataagcatcagcaaggcctgcaatgtggtcctcataaggatgcacaaacttgttgacaaacttcttctcgctcaatgcagctgtggagtaataatccaactcactattcagcaatccctttgtcctgaggaccttgagcaagcaatgccgaggcaacagccgcctgtcaaggctatacgacaacaacactggcctttgcacaatgta

SEQ ID NO: 76489 - DNA, 484 bp, Oryza sativa
acgtgaactattaatctaagcttgccagattataatcttagaccctgtttggttcatatgactaatctattagtccctctattctaggctctgtttgtttccatcgctaacactggatataagtttggattttcatggcacgctcttcaaactgctaaacggtgtgattcgtgcgaaaacttttaatatgaaagttgttctaaaatatcagattaatttattgttcaagtttgtaataattaaaactcaattaaacacatgttattaccacttcgttttacgtgaaatacctcattttcatcttcatcttcaggagattcaaacaccacattaatctcttttagtccctagaaattcaaacaggtgtgactaaaagaaactaaaagtgcatattgtgactaaaatctattagtccctcttggaggtacttatagggactaaagtggcagcatctcccttggtccacgtgcctttatgcaatttt

SEQ ID NO: 76490 - DNA, 334 bp, Oryza sativa
ggagctctcatgtcctgctcacttcgagtgccagcttccattattttacgagaagtattgtgctcagacaaaccaagataaacagtgttgtgcgtttgtgagagagaattattggacttggatagagaatattactacggcggagatcgctattgtgagataaaacgagagctaaaaaagtgggagtatagttaaaataccactcccctacatctgtccatgccatccagtattagtagggtgttgtgtggcacctctcgccgcgaaacggtcgtaatccactacgatatactccaagaataactaacccatcctacgtaacgcgcggacatga

SEQ ID NO: 76491 - DNA, 280 bp, Oryza sativa
gcctgggagcactggaaagtcattaccggtatgctggccttgccaatccaataagtcaaataaaattcttctctcttggcacccgaatgatatgtattgagaacaatatagcaatctccgcttgaaaactttccaagctcctcctttggaagaacagtcttaacacttgcattgacacaataaacctgaaatatccacatgtttcttatgggtacattcctattattgcattttcccaggcttcctttataagtgctgaaagcttataaaatatacctca

SEQ ID NO: 76492 - DNA, 423 bp, Oryza sativa
  unsure (1)..(423): unsure at all n locations
ntcatccgcgaggaggtggcgcgacttctggaggccggattcatccgcgaggtcatccatccggagtggctggcgaacccggtggtcgttcccaatgcgaacggcaagcttcggatgtgcatcgactacaccgaccttaacaaggcatgtcctaaggacccttacccccttcctcgcatagatcaaattgtcgactccacagcggggtgcgaccttttgtgttttctagatgcatactctggttaccatcagattcgcatggctagggaggatgaggaaaaaactacgttcattacccccataggaacttattggtatacgacaatgccattcgggttaaagaatgcaggtcctacttttcaacgtactactcgaatttctttgggagccaaataagacgtaatgttgatgcttatgtcgatg

SEQ ID NO: 76493 - DNA, 334 bp, Oryza sativa
gcttgatggatttgtgcatgcatttcgggtcaacaatctcagtgtgccgctttggtgtgtagattgctcttggctctatgttcgggaagagcaatgctccaatgctctctaatactatcaatattatcagagataaattaatttactaatacaatgattaagatttactttggcatttatgttttttatctattatcatccattgcgctggcatcgctcatatttcatcgaaaaagcaaaaaaagaggagtacaaggtttagtcactactaaatgacgattataccctctgaacctattttttctgacaataatgtttctccacatttttacta

SEQ ID NO: 76494 - DNA, 478 bp, Oryza sativa
  unsure (1)..(478): unsure at all n locations
actaagcttgacgctacccctacctggcgcgccaactgtcgaaactagatttcggcaataataaaagggggtggctatcaagctggtaaagtgtatgggttntgagacaaaggatttatacaggttcaagccttcttataaaagaagtaataccctactcctgtccggggatgaatccgccgagtgtattattgattgtatgattcgagaaaaatcaacatatgcccctagaggcgcccggaccccccttatatatgggaaggagtccgggttacaaaagataatctatatccctaacggaatatgaaaatataggtaagatacagtcgtaaccgactaagtttcagggtgtttccttgatacacaagttaagaaacaaacccaagatacaaataagaaattctatctacattaggtatcctgtgcccagctcgaataccatcgccgtgtagatatgggatacccatgatcttcacac

SEQ ID NO: 76495 - DNA, 319 bp, Oryza sativa
ctgcaagctttaccttttatatttctcttgatattatttctaccatatgaacaaacatgaaaattttgaagattaaatttgatttatttttcatccctcacttagctacatggaatcatttaaattaaacaatcacttttcccacacaaattaagctactgactctggtaaaatttctacaaccattatatcaccttcttaggtttactttggtggctaccattcactcggaactggtactctaactagatacatatctattcttttattggttccaaattttcattagtggctcaactggaaggtcgaaaacataata

SEQ ID NO: 76496 - DNA, 373 bp, Oryza sativa
  unsure (1)..(373): unsure at all n locations
tgactgttggtcgcagtctatggagaatttgggtgaatcttctangaagcttactaaagacctagaagtatgacttataagctccacccgatgggtagtctacatactgtctattaccagataagactctgagtgaaacttgcttgcataagacttgcaattcaaggcgtagtccattgttcaagttgtgagtaagtgtagcttggagttctagatggatgttcaaccttaatcggtctccatcgaaccgctggtatataaacagtacattgaaaaaggcaaatctcagtgggaatttgagatttggtgggggattgttcggaataatagatgggcctanggccattcgaagattaaatctttgggaaatcac

SEQ ID NO: 76497 - DNA, 166 bp, Oryza sativa
tttgaatcccctataaaagaagattgaaaacataccttccctattttgaagaaatcctagactggagatatcaaatcccaggtcacgcgaacctcatactttgaccaacttcaagttgcggatgataactgcgagcaacgcatcatcaacaactctttcactttta

SEQ ID NO: 76498 - DNA, 439 bp, Oryza sativa
tgtttccaatgtgaagtattcaaaagcaataatgtaatcccatgtgctgagaactactgtagctattttactctgtcagtttaccacatgttcttaatcctaccatgctacatatttttaactatatgtgaatcaataaaatgcaaaacactggttcaaagcacaacatataagagttcaagcattgtatcaataacccaaatgtctgctcgtctataactatatgcagataaagagcaggccagatatagcatcattgtatcgtaatctacggactaccataaagccttgcttgagctgggcatgaaaatgaactctgaaaactaaaagttaacctaccttcccaatatacacagaagatacattagtctagtctaaacctacatgttaaatagagtagcacaccatgcactaatcagatataagaggatgaaaagag

SEQ ID NO: 76499 - DNA, 359 bp, Oryza sativa
caaaccgttcaagaagtattcattgtccctgctgagattataaacttctaaagcaaacaaccaatctgctctggctaccaaacaaaagttctgattgccaaacatgtttctagacacagtcaaagactactactactaaaatcacagaatttgatatgaaaaaccacaacaaggatatgttttgaccatgtatattcaatcaataacacatgaatcagccaaactttgtagtcaaaaccaagtgttgccatgaaaccctcaaaggacaagccactattaaagctaaacccttaacttagctcatactaaattgtacaaactgcatctggcagaattccacacacaataattcatcgaat

SEQ ID NO: 76500 - DNA, 471 bp, Oryza sativa
  unsure (1)..(471): unsure at all n locations
ggagcatattctacaagaatcattcatctgaagcacatgctgttgcggcttaaggattactagttgagtttgtagcatgccacatctcaactgaatcatatccccttgccatgatctctatcttgaaatgactgataagttagaccatacaatgcaatttaactggtgactcagttttgtgaagacaactaatgtgatgtgcttttggcatttgaagccaaaacaatcaccagcatttagtctgctagtcatgtgaagcaatgcctcttctcttatgaagtctgtattatcatgtaaagagtttaagcactactggccagcatacatttttttntcttgtgcaagttactgcaactcggcagcgtgaggtttatttatttaattttcttctttgggaatgaatgatgtccttgtaaaatagaacattcattgtaatgttgcagaatttgcgatgggcatcatatgattctc

SEQ ID NO: 76501 - DNA, 85 bp, Oryza sativa
tttttcttattcttttatttttattattttatattttacatttttattatttatatttttcattttttaattttttttttttttt

SEQ ID NO: 76502 - DNA, 290 bp, Oryza sativa
  unsure (1)..(290): unsure at all n locations
tagtatacctcttcgtgtcagcgtcgtattcacttctattgttctaacctatatncgtattcgtgggaaatgcctggtcgtgttaacaagtaagcctgtgatcactactcatatcgtagtttcgtgttcagctgcaccgatcacatggctttacggagcaacaattggacaacgacactgagtcatggagtcaaaaacattccaccctattgaaacgtcgttagtttactttttctccgtgaaatacacgcgtagatctcacgcactacacgcatgcttttttggatggg

SEQ ID NO: 76503 - DNA, 445 bp, Oryza sativa
tactaagctggtgttcaacaagatccaccttatatacaaccaattcactggttcttctctccttattattattaacatagtgatgatacctccatacttgaagaagaccacccaattctgacagaacaatgtacttggcacaatcgacaagtgagctcttggcgtctaagacaacccttaatattggagagggtccatttgtattgatagcatgaacatcaccattgcctcggattgcatagaacaatctatcatcgtcattgtacaaaacatcatgatagttccaacatagctcattaacattgatccaagtccaatgagtgtcacccaccctcgtcaagaaaaggagattacgtagcacgtgcacgatcattacagtgcagttttcactggatggatctgctgacaggacaaccctcctgtagaagtaaaaccggccttcttc

SEQ ID NO: 76504 - DNA, 368 bp, Oryza sativa
  unsure (1)..(368): unsure at all n locations
tctnctcgtgcttcacatcgtcaagcggccaagcgaataatgatgtatttgaatcatacattgagtttggaatttggtattctacttcatcttctatatgcttaagtggatattccgatgctgatttttggtggtgtagaatcgataagaaaagtactagtggaacatgtcatttttatggtacatcattgattgcatggtcttctaggaaacaatcttgtgttgctcaattaactgctgaatctgaatatgttgttgctgctagttattattcacagaatctttggcttgtatctactctgaaagattatggtcttacttttgataaagtacctctcttatgtgataatactagtgctatgtatatt

SEQ ID NO: 76505 - DNA, 452 bp, Oryza sativa
  unsure (1)..(452): unsure at all n locations
tactaagctntgatagcctgtgacgtatggaacttgtatactctactgtgtctcttgaactaagggttgtttggtttagtactaacttattgcactaccaaaactttggtaactataacagtagcaaatgtatagttggtttgctaccaaatattgcccacaataattcaaattcaatactacccaatttggagtgtctaaacttatcaaggttttggcactacaagattttagtagggcaaaaattggcttcaaacaaaacaagccctatatcttggtatggccacggaatggttattaatacatcatgagtctaggctccgcactgccatacgctcagaacattttgacaagcccaaacaaggtctattttttgcaggtaggtatgaatttgtcttctttgctctttattatttgtcagcacctgagttgcaaaagcataaaccaacgag

SEQ ID NO: 76506 - DNA, 471 bp, Oryza sativa
  unsure (1)..(471): unsure at all n locations
actaagctttaacgagtnttttttccttaactttgaaaaccagatcttatttgatgaataccccgccgntttgctataggaaattaagttacataatatatacagataggatacaatatgattattaaaaccaaaacaaattgatacttataaattttaagcctataaataattaagattgtatggtgctctgagagaaaaaagaagaaacaatttcaaccatacatctataatctaatggctagaaataattagtgtgatatgacttaatgagaaaagagagaaatagcttaacggggggatgaactatataagtataagtataaatgatacctcctcggcttaattgccgtcgagagtgggaggtgctaatggacgggtggttgctgtgagcgatcacccgtccctccnctaagacggctccccttccccttccacatccccttcttctctttctactacgccataatt

SEQ ID NO: 76507 - DNA, 409 bp, Oryza sativa
  unsure (1)..(409): unsure at all n locations
atanaaactaagcttcatctcgccacgaaccacctcggcgaaagagtgttgtgtttagctgactcagatctgggcagaggtgagggctccaagcagtaacccagccatggtgaggcttgcgcggcgccttgcgtgtggccatggagtcaagaggatggccaggtatctgcaaagacctcttttgacctacggacgatgcggactggcgtgggcgacnccgactggagtgtctgcgccngcngatggggtgggagacggcgtggcatgagcggcttcttttactactactaattcttgattaggagtactgtcatagtgttacacactcaaagctacttgcaactctaaggaaaagcctggagcaaattaagatcatatatgtatgccattgaaaatattgttagtagag

SEQ ID NO: 76508 - DNA, 460 bp, Oryza sativa
  unsure (1)..(460): unsure at all n locations
ntcttccacaagaaattgtccaacagcatgtaggactttgtttgcaacttcatttgaaagttgatcaactactggtccagtttgctccattaattttacaagtaattcagcatccccagttgaaagaacctcagcataagccgaatccatatcaccaacatgtatcgcatccattgcacgagtccaagactcccaaattggtcctctttcatccccttgattatcatcattcaaagtttccccatccaattcacggatagcaactctcgcagctgccctagaagttccattatcttcaccagcaaccctaatagcttccagtgtcgcttcatctttggaggctcgccatgcacttcgagcagaaggaccctccccaaacctaaatggaccctgtcctttgcccatcctcgcctaggtcctgcttgatcattgcttcgttcatttctaggcaccctgttat

SEQ ID NO: 76509 - DNA, 461 bp, Oryza sativa
  unsure (1)..(461): unsure at all n locations
ggaccttgaaactaagcttacnagcgaggtagtccgcgccaaaggcgcgaattgacatcctcacaaagcgctcggaaccaaagaacatcctggccgaactcgggaaaatggtagcgatgtgccctggaagcatggactccctcagtacagctcccaatacaggaaacggaaagtctccaaggaagagagggacgctcgtttgaaggccgaacttaaggttgaggtcattcaagaactagaagctagcatgaatgcaagggtggaagaaagggttaacaaggtcctcgccgacatgaatataccccgagtcacaacacctgctgtgcaactaactcctcgtgtacaacacgacacgagtccgtcacagcatatgagtaagtgtgcatccacagaagtgccggcccctggttctccgatcgcaccactagctgcagtggaccacatcgaggtaaattgttgta

SEQ ID NO: 76510 - DNA, 327 bp, Oryza sativa
ctgccgtgacgcgtctcatgtgtagggacgaggctcatgtgttgggcagtcgcggagtgcgggtaaagtgtacatccactgcagtgtgagtcaaccaaatctattcgaatagccgtgctcgcggatattgagcatcgggacgtgtattacacttggctagactctaaattcataacttgtgtgggatgggttatcgcatgatgatgttatactgctggagccacttcctgagacgcaggaaggtggacgtcctcaaaaaactatgacgacaatggcgggaagctattcttgggatcacaatggatagcgggcccactgagcgaaccg

SEQ ID NO: 76511 - DNA, 398 bp, Oryza sativa
tgacataaacttccatctgtataaaaccatttaaaaaagcacttttcacatccatttgatacaattgataaccttttgaagcagcaaaagccaacaaaagtctaattgcctcaattctagcgacaggagcaaaagtttcatcaaaatccaaaccttcaacttgagtaaaaccttgagcaacaagtctagctttatttctcacaatcaaaccatcctcattttatttacttttgaaaacccacttggttccaataatattatgttcagaaggtggctcaactaaagtccaaactgtgtttctctcaaaaatttcaaagttttcatgcatggcattaatccatgagtcatcagttaatgcatgtgacacatctttgagtttcaaaaaaagcaacaaatgc

SEQ ID NO: 76512 - DNA, 455 bp, Oryza sativa
  unsure (1)..(455): unsure at all n locations
tcctttgcttcctccactcaaatctgtagtctatcttgttagattgagagattagatgagagtgtaggagtgttttggagatggcttgaagattacgtttaattgagcactttggataccttgtgggctgtcactttggatactctcagagatcttctcctagacggttaggtgtcgcccgtgagcttccaaagatcttgtggatgtcccgggaaagtttgtgagggttttcctcacctccacaaggaaacgagataagtgagtaaagattcttgtgctgagttttcagaggttgtcctatgtagagcaacttgcacttgtggccttttctagaaggaattttgagtttgatcttggtggtcactcaattctagaaaatgacctanaagtgttgttgtcgaaacgacaactgcatacgtcgaaggatgttgagtactaaantntgaatttcactt

SEQ ID NO: 76513 - DNA, 451 bp, Oryza sativa
  unsure (1)..(451): unsure at all n locations
ctaagcttttctcgtgtgtcattggacctaatcactattaattttctctttatgaagaatcactgatgaaatctgagtactaatngaacaccatgcggcaagttgtccagttggagttcagaacaatttgatggttttttccatttggaggtattaggtaatccagatagaattgcttccaaatggcgggtaatcatactgagaactttaatcatcgagcacgtaatcatctgtgagaactgaagggaaaatatatatatatatatatatatatatatatatatatatatatatatccttgggtctgccgctactatatgcttattagcataaaaagtgtctctttaaagttggtcaccagaagcacaatagaccttctgtttgataaattatgaacgcatcatgctggagggtggattctttcccatcctcagttataactcacaatgat

SEQ ID NO: 76514 - DNA, 355 bp, Oryza sativa
  unsure (1)..(355): unsure at all n locations
tgatgatatcttagttaatgtactcatatatgcaagtnttataatattataagatacggtgagaaactgatatgcattatatttggggtggagtgaatattaactattacaaaactgtcgacgcttgatgtcgcgattcccgtatttgcataatatgagaatcgctggtactaggatatacgcgagactgatgtaaaagagacggngacaagtagttttatacacgttcgggccctgaatgtcaagtaataaccctacatcctgttggccgaagccggtcgttgctcttattcaccataatcacaccagtacaaaatttggggtagcctatctaactgttgtcgacatggctgtc

SEQ ID NO: 76515 - DNA, 302 bp, Oryza sativa
  unsure (1)..(302): unsure at all n locations
ngccggcgcacgggatccaacggacacactcgcgcgcgctctcttcctatcgagctgnggaggtgggcccacacagcatcatctgcgtcgtcatgggggagatcttgatacgttgttcacaatatctcctgatgtaatctcgaaaggaatctccggacttctgaatgacgttgtacagatcatattgtgtgcccggacgctcgaaggtgccttggaagttggcgatgaagtggtcgcgtatttcggcccaagatccaattgtaccacggggcaatccatggagccaagatctggctgaatcc

SEQ ID NO: 76516 - DNA, 463 bp, Oryza sativa
  unsure (1)..(463): unsure at all n locations
tgcatctggagggtctatagatggtacatctgagacctgcatgtgctntgtcaagaatttgaagagccggccatcaggtgtggatttcctggcaaaagaacctgatgacatgtagtctgctgccaatacagtgtatttctcatccttccatgggttggtgcccattaacctgacccatttgctgcccttggcaggaacaacaatatttgttttcgtcttcaccaccttcccgtagatgttaatgattggcatggcatggcacagctgtgtcacaaagtagccctctatgtggcccatcttaaatgaatggtataaaaagtgggcaaatgcgactatcgatctgcgatcatggtccagcaatttagcaataatattgagtccatagccatggacagaaacaacctgcacgttcacatgccaacgtaaccagtttgtcacaaatgtgttcttagagaaatcatat

SEQ ID NO: 76517 - DNA, 458 bp, Oryza sativa
  unsure (1)..(458): unsure at all n locations
ctataaaactaagctancatcaactggaacaaaacatcactactagatggctctctgtgactatcttgaatgaccgtgcacttggattgagttgtccaccgcctggcactgccaccgtgcctggggcatcagcagtggggtccaaatgctggttgggcacggcagcagcaatattggcactgacattgggattatcgaagaaatgggtgacagtattgggaaagttgcggtatatggtaacaacaaaatcaaggaacggctgcacctctgcctcgacagtagggcgaaagttacggaggagatcaaatacaatcctgatggcaagaagtgcattgtcctcattgtcctgtgtcaatacacgaagagagagcttgagcaggtcttgcacaaaaggtcggagcacctcactgtggggtagccgattgaggatctcaatcaccacattccgcagcttgtgc

SEQ ID NO: 76518 - DNA, 443 bp, Oryza sativa
  unsure (1)..(443): unsure at all n locations
tgcacatagcaccaaacctcacccacatccatagtacattcaatggttgaacaacagtggtaaggcaaaggtaacaaaactggtgcgccgttaatttgcaattggaaattaccatgatgttgttgaatgtgatgttgtgcctatgcaagcatgtaggggtgaaatcgggtcaggttgggtcggatctcacccttcccgtatcctaacccacattttgcaatcggaatcgggtcaaatacgaatagtgtcgaatacggatacaaactcggataatatctggcacaaatatgaaatggatttgtaccaaaacatatatacgctatcggttacgaatgtttatttggatatctagtcaaaaaaacatccctatatatccctatatattcataacgtgactatattangccattagtatcttacaatcaacgagcttctaatgtgat

SEQ ID NO: 76519 - DNA, 343 bp, Oryza sativa
gctagagccgtcggcttatatgaagccttgtttcgttccaaaacgaaagaatgtgtggagggaaaagccaaagacgcccgctccatcacttccagagacaggtggaaaatccgcgaactaaattggaaggaggtacagtcttgctcgtcggactttaaatgacgccaccttcgccaacaggtaaattgctatgtatctgcatttttgctttcaataatttgaatttttgcatcatcacatgtttgaatttcaaaattgcatttagcatttttgaattttgaggaaattcttcaaatgaattatttagagcacaccaaaataaaattttcaacggaaattcact

SEQ ID NO: 76520 - DNA, 446 bp, Oryza sativa
taaccattgcgtgcgcgaagtcctcgcggaacaccttcttttctcgcttcccggccgcgtacacgcgcacccaccgcacggtactccccgccgtgagctgctggtccgaccgcaggatgccccgtccaccgagaagcttcgcgtagtattgcgcgccgaaacccacctccctcccctgccggtagtaccccatctccatcggcgcggcgccgtcgccgtcgcacaccgcgcgcatctcttcgaccatgtcggcgtcgatggtgtcgtcaggctcgcctgtcccggcgaagttgtcgatcctgtccttgaagaatctgcaatgcaccttcccgatgctatgtgctcctgctacagcgccaacaaaaatcaaatgcatatgcatgcgcgcgagcgccaatggacagacggagggacgaacgggacggacctaagagcgcgacggtctc

SEQ ID NO: 76521 - DNA, 391 bp, Oryza sativa
atggtggaatgcagtatcactggtacaattctcaaacctgtacaatataatttctctataaaagaatctggaagagacgcagcatggcaactacaagtctacaatgttagtctgaatggagcaacaccagtcaccttgataggatatagcctgcactgatgcacatatggattgattagatccgaatcacaccattaagaggagagatttaatatatgtgcatacccttcagctgaataagaatccacacagaagactaatggggatttataagagtcaatttgagtcaatggtgtctcacttgatcttaccaccataacaaatattgacccacggctggaagtacctacaggagaatatgccccttgataacggtgcaagaactgaagct

SEQ ID NO: 76522 - DNA, 460 bp, Oryza sativa
  unsure (1)..(460): unsure at all n locations
ataganacgaagcttaatgtgcccatcattcatcagatgtataaaaagttatttatattattaccatataaagatatattataatagctggcttcaatgattgcttaatgattgcaacatgaagtcaggcattccagaaagtgctcaccagttgtatgcaaatggagtaactattaaataatcaataactacaaataaatccatccatagtcgtggccacccatgtgtatgtgcaggttgggcatacaatgcatgcagttatgcaagggtacactgacatgtcataaacctcaaggtcaaacaaactgtgcctagcgggtaaaacaagccagcatatatgcaactgtgcaagtagataaattcttttaattggcatatcctggcttaacttgttttgcattatcccatgcggccacatgttagaaaaggttgttcattgccttcnggtacatttgcatac

SEQ ID NO: 76523 - DNA, 278 bp, Oryza sativa
tggcacagagagtacaacatctaatggacgggcataatccggtatatcagcaaccaaagaccgaaactttggcagctttaggttgacatctggagcaacatatctgagtctcaatcatcaacttacagaccttgtgaaggcatatatgatggtgaagctaacacttagcgcatattcaacaaagtcagcggaagacccccagtttctagattcattgacaggaagtggtcagaatcttgtggcacaatccacatcatacatcgttctacagactcaga

SEQ ID NO: 76524 - DNA, 445 bp, Oryza sativa
tgacttctgaacccgaatatgttcacaacaaaggctggatttagatctaaagtttggatccaaacttcagtctttttccatcacatcaacctgtcatatacacacaacttttcagttacatcatctttaattttaactaaaatctaaactttacgctgaactaaacacagccaaagccagattcgccgcgcttgccctctccggcaggcggcagcttgaccctacgcaccaaattaaactgaacagataggataggataggatgacctcattggagcgccagcatgaataacacagtaacctttttttctcgacacgaaaggagccaatgacctatatgagcgcttgcttttgctgaactgtactttacacggcagataacctaacgtagatatatctactgaaagcatctcacgaccgactgactgctctggcctttcttataa

SEQ ID NO: 76525 - DNA, 379 bp, Oryza sativa
  unsure (1)..(379): unsure at all n locations
tactaagcttacaaaggcgcctnctctttattggtgggtctgaagaagctatgctctgatgtgctgcctcttgatgagattggctcttacgttgtgccagtggaggagactggctcttatgtggcaatggttgtggagttggcatcctttgaggggagggaggaagtccttcagagctagacccgccatcgcttggctcgccatcaccaccttctgaagggaagataatgaaacgcttgcgccacatgattatgtttgggaccgcttcttcaagagtgttcaccccctcctcaggagcaaaatcaagctgcaatgccctgtatctactcggcacgttctccactataatcctttgatagccacttagtatcggcttact

SEQ ID NO: 76526 - DNA, 452 bp, Oryza sativa
  unsure (1)..(452): unsure at all n locations
tgtccttntcagtcttactatccgaactntnntgtcccgtttcttgaattttggncttttcttttggttcttgcttcgtttctggtgcagnttccttcttgacctggagaatcaaaattgccattagtcactgtgagatgatgattcgctttatcaagcacccggtaatggagtttgcaggtttcatcagggaaaagttaaattatagttatccgttcctcttgggtcttaccttgttcttttctttctgaagtagctctctgacaggatgataagctgccgtcacgcaaatattctgaagaaaaaaaagtacagatttaatatttcagagagtgacgactgaataaatcttctttataataccaaaagtccaaaagcagtgtacagaccttcaagtcactgctggtgtatccttcagtcattttggcaagctcctttgaatcaatattttc

SEQ ID NO: 76527 - DNA, 460 bp, Oryza sativa
  unsure (1)..(460): unsure at all n locations
tctgaaggtcgccgtcctgatcggctccggtgagatgctttatgatgagctcatggacagggtgatccttcagctgcacaaggcctctgtctgtgacctcctgatcccggcaaggccaccggcgttgaccacctacgacatacagctggtgctgacgctcgtcggcaggttcatgaggcgagccggagtgactgaagatgggatcttcctcaacaaccttgatcaagagatgttcgagaccgacgtcgacgatgaatctttgctcgcactgtccaagattgttgatggatacttggctgaggtcgcctctgatccaaacctgtcggtctcgagcttcgttgcagtggcgacctccatgcctgatgcagcaagagcaacccatgatggactgtacaccgccattgatgtctttctcaaggtatatattctngacaagaatcatgatgcaaacagtgatcat

SEQ ID NO: 76528 - DNA, 419 bp, Oryza sativa
  unsure (1)..(419): unsure at all n locations
ntattaagacanaacgatgagtnttttcaacagcacggtggacagttattgctagaaatgatgaaagtagagggcaatgcanggtttacactctacggtagacaagagattgagactgccacaaataacttcaacaaagcgaacatcattggggaaggagggcagggaactgtttatagggcggtattgggtggaatcgccgtcgcaattaaaatgtgcaaggagattgacgagaacaggaagatggaatttgtgcaggaactggtcatactttgccgtgtcaaccatcccaacattgtcaagttgctcggttgttgcctgcagtttgaggcacccatgcttgtgtacgagtttgtgcaaaacaaaacactgaaagagttgttggatctccaaaggagcacgaggttccatgtcacact

SEQ ID NO: 76529 - DNA, 464 bp, Oryza sativa
ggacctataaaactcagctggagtggtaattcttgcaggtgtatatgatgagaacttctctgctaaagttgtgaagactcttgagcgagtacgttatgtccggatgctccagttaacagcaatgccattcaattctgacattctactatccagtataaagaagttaatccatcttcgctacttagaactgaggtgtacgtcggataagcccaaatctttgcctgaggctatatgtaagctctaccacctacaagtactagatgttcaacattggagtggtctaaatgatttgccaaaggatatgagtaatcttgtgaacctacgccatctgtttgttccggggtcaggatcattgcactccaagatatccagagttggggaacttaagtttctacaagaactgaaagaatttcatgttcaagaagccgatggctttgagatttcacaactcgggaacataaatg

SEQ ID NO: 76530 - DNA, 445 bp, Oryza sativa
  unsure (1)..(445): unsure at all n locations
acgcgctgaacaaaatacaaggaaattnatactagtttcntttggcattgaaccattttaaaaacatgcctctaaataaaactgcctggcattaagccattaaccagtggcgcagaacatgcacagcacactctgaatacacctcttgtgtttgtcaattaatgtaacaatatatatgactgctcacgggtcaggataagcaaaagcattatctccaagagtctctcttttacctcataaccattcaaatctattgttagtctcaacattatatccaagtatacttacccaccttctttcatattaatgaataacaattccctggcccaatttttatgtccaccttattagtacatatatgaaaatggccaggcacgcacatttggataataatagttgcttataaaccattctaaatagcaataccaggaaaggtgcagcactt

SEQ ID NO: 76531 - DNA, 452 bp, Oryza sativa
tctggccaaagtctatgggaaggatagttcccagttatgttagaccaacactctatctaaaacttctctagcaggagaatttagtttattggtccatgtaaatttaccaacagatctgtgcaaatctctgcgactcggcaagtggcggcggagcgacatggagagaggcgcacgcgtgaagaactatgggaacctgggactgaaaactatggttatgatgatgtgggcctgtgggctgtggttgtgggcttcagcctactgacttgctgacgtctagctcgtttatgctcgcgagccagctcgagctggctcgttatctctaacgagctaaaatcctagctcggctcgttagaaaaatgaaacgagccgagcgagctaacgagccacgagccttctgtccacccctatgcagttacccattcccgctcgtggcagctctgtatgtctttcat

SEQ ID NO: 76532 - DNA, 340 bp, Oryza sativa
  unsure (1)..(340): unsure at all n locations
cacccacagaaagttaatcgacccatcaaaccaaataaatgaactgtctaaagtacagataaacggttaaggcataatacaagttactacactataagacagcatgcccggccatacatggcatatattgaatcaatttcagtagaaaggaatggagaaaacatnttattcgaggccatctgatctattcatataccacgaatggcatgattcatcaattctacctaagttcagcgggtatcacccaaacatgagttgctagtacataaactacatgccgggttccccaaattgaatccctaattatcactaatacataactattaccaagagaagggag

SEQ ID NO: 76533 - DNA, 443 bp, Oryza sativa
  unsure (1)..(443): unsure at all n locations
tctncggttcttgatctctgcccgaagcattgaggccaacccctataatatacgagctatagagcggatgcgcccncccaggaagcttatggatgtgcaatgcgtcactggctgtatggccgccctaagtcggttcatatcgaggctgggagagaaggcgctacccctatttaagctcctcaaacgctccgggccgtttatctggacggaggaggctgaacgggccctcactcagttgaaggcgtacctcagttctcccccagtcctggtcgccccggagccagatgagccgttgctactctacctggcggcaactccgcaggtggtcagcgcggcgttggtcgtggagcgcgacgaggacgaccctcgctccgcgcatccccaccctgtgtcgactcgacccgggagagagcanggaggagaggcccccgacgaccgaagct

SEQ ID NO: 76534 - DNA, 476 bp, Oryza sativa
  unsure (1)..(476): unsure at all n locations
ataaatactaagctntcaaaccaaatcattgatagcttaagttgaataacattgttgttaattcatccaacacacaatctatacacaccaaccacacaactcaaacatggaaaacaatcagcagatatttatatatagataaaccatcttgttcctgaataagcacacaaaccaagcccatcgtacttagatattaaactgaatctgcttactacatcataggtagccaaatccatctaagccaacagaaaataattcttctgcacaggaaaatatataagcttcattgattggtaaaacaatatgaatactagcttcccacatatgcagctccatgtaatcaaactcacagcatgtgaatacagataagtacagcggtaaaaaaagaacaccagattgacaggcagttcaatagcaaaggtccaagttttggagtacaagagcaccgaaacatgacataaatactaaaaacaata

SEQ ID NO: 76535 - DNA, 437 bp, Oryza sativa
agcttagcctgctaactgcatacattggtttctaattccctctcttatgtgaatactgcatgtttcttagccccccacaaaatgcatgttcgtgcctcacataatacatggatattgatacataagtttacagtctgtttgtttctatttatgcatttatttgctttatggtttcttaaaaaacaatcttcaaggctcaagctcatttgacctgttaatatgggcacacactttgatgctagagtagttcctttggaccttcttgcaattctactataattctccatgcaaatttagctatatatcttcgagtaattcgatctttcacccactgtagtctgtacctcaattttgttcgtattcaacttcacggatttatcattcaactctttcagtggtgacttgccaacgtcgtttagctcatagaagaaccttca

SEQ ID NO: 76536 - DNA, 458 bp, Oryza sativa
  unsure (1)..(458): unsure at all n locations
actaagctagctgagaaatgtgagccggacgctgcatgaggttgttttggattgggctgggatgctggtgagcttgagaggaagcggngcctggtagaggtagataggctagagaggaggtcagtgccagtgtggagtagatgcaggtctcactaagctgtgccgaggctcatgcatgagtaataaagagcaaagcccaacttctgttggattttttgcatggtaggttatagagagaaggcatgctcgatacccttgctacgtatgttagtgagcttctttttaaaagattatggatatattattcatatgaacaaaattactaagctatgaaaaatgcacttctgatcccttggacaaacaataacacatattatttccactacaaaataatataactgcataagttcatctactataacaccgcctatatacgtcggtttgcatcatattgtttg

SEQ ID NO: 76537 - DNA, 407 bp, Oryza sativa
acgctaccgctacctggcgcgccaactgtcgaaactatatttctgctataatcaaagggggtggctatcaagcttggaaagagtatgggtttggagacaaatgatttatacacgttcaagccttcttataaaagaagtcataccctactcctgtccggggatgaatccgcccagtgtattattgattgtatgattcgggaaaaatcatcatatgcccctagaggcgcccggaccccccttatatttggaaggagtccggattacaaaagataatctatattcctaacggaatatgaagatgaatggtaaatacagtcgtgaccgactgactctcatggtgtttccttgatacacaagttaagaaacaaaccccagatacagatcagatattctatctacattaagta

SEQ ID NO: 76538 - DNA, 454 bp, Oryza sativa
  unsure (1)..(454): unsure at all n locations
tcngtggatatctcaagaagagactactacaacgatcattttatgaagattaagttgaacaaaatcatttgataccttcttttgttcggcagattcctattttgatcaaattattgcaatacccagaattatgtttcagctaggttgcttccttgcttgttcttgagctgggaactggtatcacaaagtcctactccattcgtataataatctaagatttttctagcattgctaatattcgtatagatgttaatgaattagacacattatgaaacggagggagtagcattgatttcttacctcacctacctgcctctcactatcttcagattgtctggcttttcactcgcgatttgtataggatcagtttgggatgtacacattaaaatcgagtagccttgaacgcttgtactaacttaatgcaaattggtacagactagagagataaaacaat

SEQ ID NO: 76539 - DNA, 451 bp, Oryza sativa
tggatggcacatcggcccacctgcacatctgtccattcataatttgtaaatgttggtagatatatacacgggcaatatggtacaaatacgtagtatgacgaaacatattagaactaagctaaaaaaaaaatcagcaaattaccgatctttatttcaaaagtcatggtataccatatctatctcacgcataggacactcttaccatgagtttcattgctaattcgcacattaacatacatcatgcatacaagtagtaactgaactatgtaaagcaaagcctgtaagacgtactaaaactcaaactcagccataaaatcgttcgacacaagcccggttgttgtttcattaattctgtcagtttagaagtagaggatcgggtaaattagtgaaaattcacaattcataatagatgaaccctaagttttgtatagaaatgtaactccgtctgact

SEQ ID NO: 76540 - DNA, 456 bp, Oryza sativa
  unsure (1)..(456): unsure at all n locations
ggtttgataatatccttcctaaagaccccatngatgtgtattttatgatctgtcatttgattgaatcctgtgctgttttgcagaatttggaggcaaacggaagaaagttggagctgggagccagagtggtaaagcaggtggcaagtgatgttttcaattcaagatacggttggagaccttgtgttaaaaggctggaatgaagctgctaatggtgtgcttttgtgtgtagacaatgttgtctctcttgctgctccctctctgtcttctcttcctctgtttctctagtcttctgctagaacgatggcaaggccttcagttcagtcttctctccccagcccttctgcgctggcctctgcgaagatgacttggtttcagctttgctggacatttttcccctctcttaacatctnttgtttntctctctccagtttctgcttggaatgacttggtttatgc

SEQ ID NO: 76541 - DNA, 457 bp, Oryza sativa
ttcaccgtactcctctaaggtatcatataaacatgttctttcattctagttcatgaatgatgcacaactaataatgatttctcaattgccttcatttctgattgcacgagattatgagacagaagctcaaatatgctatcaaggagggtttaggctccttccaattatcatgataaaaggctgaaggacaacttataacagaacgatgtacaatacttcagatgatagatgttcattcacggctgatggcaatgatggaattgcactgactcactaatttgacttagattatctgatctggcgaatgttttacttggggaaatagttacttgagatgtaacaccaactttctcccctcctgctagattatgtatatagactacttcgattctttcattttatatgtctatatgatatgtatgtacacccgcaatctctgtggactgtattgctgctc

SEQ ID NO: 76542 - DNA, 453 bp, Oryza sativa
  unsure (1)..(453): unsure at all n locations
taccctaccagaggtgtcgagtatgccagacagctgcacttttctatcttgctagtcagagcagctagttatgattgccaataattagatatgattgcttagctnttttttgtttggccaagatatctcaatgtttttttggcatcaccatattatatttgtgagaccacagcgtatgtctaatgaagtctggagtgtaagcatctttgtttactaattaccagaattatcatgttatagtccgtggaccatgtcgttttctttattatcatgtgctaggctatagagaatccatcaactctgcagtatatgatgcaaccatgctgtaaagggccagtgcattctctaagggagggcattttattatgtttctcttctttgaataagtagtggatataatcagaatttattgctggagaaatagtgaagtagctatgtcaatttgtattttga

SEQ ID NO: 76543 - DNA, 446 bp, Oryza sativa
  unsure (1)..(446): unsure at all n locations
tcgtgtcttactgtctggctcgctctntgtttattttcttattggctttganccaatttcgtgtgctcggtttggtgcggatgctgtacgcgtggcggtgaagtattcggaggagcagattatgctggtcgaggagtccatccggattcgccgcgcagccgtgtccgtcgagctcgtggaagctgtataaccattcctcttacaattaaatcacttctgttggattttaattggtgttgctgttacattttttatttgcgattttccattgggtgcgagcaggtgaaaaagctggagaaggtgttcgctagggaggagaagagacggaaggagttgccgctcgagctgaagcagaaggtttcctatgagattttagagaggatgcgtgatttgggggagaacagcaacacgaccgaacaacgaggtactggagtcttacacttgta

SEQ ID NO: 76544 - DNA, 446 bp, Oryza sativa
  unsure (1)..(446): unsure at all n locations
tcggatgtgcatcgactacaccgaccttaacaaggcatgttctaaggatccttaccccttgcctcgcatagatcagatcgtcgactccattgcggngagcgaccttttgtgttttctagatgcatactctggttaccatcagattcgcatggctagggaggatgaggaaaaaactgcgttcattacccccgtaggaacctattgttatacatcaatgcccttcgggttaaagaatgcaggtcctacttttcaacgtactactcgaatttctttgggtagccaaataggacgtaatgttgaggcttatgtcgatgacttggttgtaaaaacgcgcaaccaagaaactttactttcagatctagcggaaacttttgagaacctccgctccgcccgcataaagctgaaccccgataagtgtgtgtttggtgtacctgcgggcaagcttc

SEQ ID NO: 76545 - DNA, 419 bp, Oryza sativa
  unsure (1)..(419): unsure at all n locations
aatactaagcttccattttacctttgcgtttcaaaaaggggcactgtcattctgtgaataatttctgcaacttttactgatcgaccactgtcaccgcccgcgcgtggctgcctcaccggcacagcagggcagagcaagggctgcaccggcagggaatttctagtgaaaggcagtgtggtggtaggtaggataggcgtagtacaccacacggcagtgcagtgcagcactgcgtcgccgtcgttttgttctgtttggaaaagagagctgcactgctatgttggcaagatcttctctcggagctggagctagctgcctcgagccgtcggatcagaggatcggactgagccaactgtgcaagacattgcttgattgaagaactaattaatctcaatgnctttctggatagctgattgcttgat

SEQ ID NO: 76546 - DNA, 440 bp, Oryza sativa
tgtcctgcggcagcggcggtgacatcggtgctcccgcgggcagtattctgcagaagtggcggcggcgttctctttggtgggcggatctagtgtcacgcacattctattcaaaattccaaacgcttacatgtgtgtgaaccctcgtccaggaatcagccgaggcacacaataacaaattgataatagagtacaaatattactctaattaataagcgaataaaatgccattacagaggtagatagttcctctcaatcaataaagttctaagcagcggaaaataaataaacggcgcagaccgctccactccacaagcagcttgaccaaggctacacctaatcctccacaccatcagcctcattgtagaactctttctctgatgaatgattgtcaagtgagtatatgacatactcagcaagccacgcagcgaatatgcaagtgc

SEQ ID NO: 76547 - DNA, 460 bp, Oryza sativa
  unsure (1)..(460): unsure at all n locations
cttgngaacacataaagcccgatatgaacgctatcctcatcttcttcattgtcggtgcgcttgtatgtaagaatttgatcagtccaacttcatggtttcgcatgtaagagcaggtgatctttatctcctgaagatgctctaacgagatgatatggtaatccttctgattttgattgctgacctctgtaggtccttcacaatgtgcctgtggagcataatcatatataatatttaacggaacttttatttaaaagaattgatggtgggttattaataagctactccttccgttntatattataagttactttgaattttttttctagtcaaatttattttaggtttgatcatattaatatgaaaatttagcaacatctacaacactattagtaacattaaactaacgaacgtataacattaaaactaacatttaatacgtataacattaaaactaacattt

SEQ ID NO: 76548 - DNA, 460 bp, Oryza sativa
  unsure (1)..(460): unsure at all n locations
nggaatcggntggaatgtagcgttattgatagcactgcttcttgtatctaccgtacaggaacctatcggggaagcacctgaaggatggtctatgcgaggaatagacatcggaggagcaagtgcaccaagacttgaattatgtgaccgatcaagcctaggaaaattattgatggcaggggcttccagaggacttcttgcaaaccatccaattgaaccattttgaccttggtgaaaaaactggttattgcttgcagatctcccatcaacacctttcatggacatttgtggatttgcatcgctgtatctgggtgtgaaaacatgtatgctgctgacctgtttacctgatggatgaagcaagagacagaataaatgttaagacatttagactggatcgaatcacgtgttagaaaaagaccagttaacaaatgtgccagctactgaaaagagcatccacatatgc

SEQ ID NO: 76549 - DNA, 447 bp, Oryza sativa
  unsure (1)..(447): unsure at all n locations
tactaagctgnacaaaggttacatcggccgatccattggaggaagtatacttatttgatggaaccaaaccaaggccgactgttgtaaacaaaaatatgagagccgattataaggtttatataatcgagctacttaaagagtatgttgattgcttcgcatgggagtaccatgagatgccgggtcttagccgtgagcttgttgagcatcggcttccaattaaaccgggttttacgccttataaacaaccaccttgtcgctttaatcctttgctatatgaccgagtcaaagaggagattgatcggttgttgaaggcggagtttattgtgccatgtcgctatgcggagtgggattcttgtatagtcctggtggagaagaaagggagtggtgtcacgtcccagtttttgtgtcttctaatttgcttaatattaaaaaaaaatcaatcacatt

SEQ ID NO: 76550 - DNA, 461 bp, Oryza sativa
  unsure (1)..(461): unsure at all n locations
tgtcaccatgtgcgtgccgtcgccgcgcgcgcatgcttgtcgtccggngggccatggcagcgtatcggacgatctatcatatgggagcggatccaagaagaaatagttgaagaggactgaacaaactgtataatgaagacgctcgattgcgagaatcgaatccaacccaagaaaaagtagtaagagaactgaacaaactatataaatgcgctcgatcgccagaatcgaatccaagaaaaaaaagagcaagagaactgaacaaactatataaagacgcttgaccaccagaatatatcgaacctaagcaaaatagtaacggtgatctgaataaactatataaagctacaagccctcgaaaattttaaaagagcccagtcccatgatcccgccatcacgggtagtgggggctcgagcaccccgggcattcccacgacagatctggccctgttgatcatcgatcg

SEQ ID NO: 76551 - DNA, 457 bp, Oryza sativa
tacaaaagagaagagaagctactagagccatacccgaactcttccgaaggtttccggactcctgatttctactctattcctattccactagctagatactactaagctaaacttgagagaaatgagagagctattgcttgaggtgtgtgagtgaagtgaggatgagagttccttttatagcctcccaatgacagttgtgacggttggaatggtccgtaataccctccaaccgtcattggggagcaatctcagccgtccaggggaaccctggatcaaacggagctgcggggggtttggccaaaccatgggctgggccaacctagcccaatttcggcaggcagcctccccttttgcttcacttcgtagacttgtgaattttggctcaattcgtcgggtcaattttgagttcttggcccattcatacataagtctgattctcgatatcgtccgattgatt

SEQ ID NO: 76552 - DNA, 436 bp, Oryza sativa
actcagctatccgaagagaccgagtctaagagaatgtggcttggtatttatctattaattaagaatagtgtgttagcttccttatatcgttatgaaagcgagtttactgtcctataacgactctatcttttccttttatctttaggaaagcttctttcttgtccgataaggacttgaatcaacccatgggtataaatatgtacacccggcggctatgttatctatcttcacgaacaatataattttgcgcatcgccaccttttaccttttctactatattatatcggccggcgggactttgcatctgacgcagggcttgatcagcgttctatcttcggtgaatgtgtactgtacaatgtcacacaaccaaggctatagatcttttacgtccgtgtcgttcaggctacatcatcacattatacctcttatattgctc

SEQ ID NO: 76553 - DNA, 452 bp, Oryza sativa
  unsure (1)..(452): unsure at all n locations
tatcttcatgctgaaattaataaaatgctntagtttagatttctattagtgaaactgtatttcagacaaatgttacagttacgctgaactgtgtccgaattgtatttcagacaaatgttggctatgcactattgcgttttatcgcacactcgtagtcggtgactactcctaggttgtgctggttgatcgcccatgggttgatgaccatgcctgtcgcatactggcgcaatggacgtctgtaagccatgtaaaagttcatcgtgttgcatgcgttgagctcgctgtgacaacgacagttgctccgacacatcccactatttttgtggatatgtcttaacataatggtttcatagtgaatattaccattggtggaggtgttgattatctctcaatggctatgtctaagggatataagcttatgtggttngacaactcgctcgtggatcgtacct

SEQ ID NO: 76554 - DNA, 451 bp, Oryza sativa
  unsure (1)..(451): unsure at all n locations
ntattaagactcagtcaaatacaccaagatgatacattctttctgagctcactcctagcctctgcatgaaatgcacacagccacaaaacatgatctaactagatcctcaacacaaaacaaataaattagtgactatcaagccgtagactagatcgccacacatgttccagggtaaaaaaactcatgtgccacctgatccaaacgacgcgataccaccataacagtatcatgaagacccggtttgtggaggacagaccaggtgcatagccaccgggtgactaaagcaataatctacaaaggagaagacaccgtcttgttgttaaaaaattaccccgtttctgcttagccaaatggaccaacaaagagctgttgcacccatcacaagcagatttctcatgtccttatgaacacatgtaagccaatgcccaaacatatagttaacatcttgagg

SEQ ID NO: 76555 - DNA, 399 bp, Oryza sativa
  unsure (1)..(399): unsure at all n locations
tcagcagacgaagcattttcgttgccaatgtcgcttccttccaccattttgcaagctagattagcaggtatgcattttacttgtacatctattgttaggggttgcgaaggcaaactccgccaggtcgtcagaacagcgagtacatggggtatgtatgatcaacctgtggactcttcaaatctgaatcagcacttcccgtggtccagtcattgttatgaacaggtggcgaatgttgttggggcgatgtgcctaccataccagctatcatgcctaatgttgcactttgactgaatacatcatatcccccagtagacatgtagctatggtcactttcactccagtattcatgcttgtgattngctatgccactgacagatggatgggaacagcagcaattca

SEQ ID NO: 76556 - DNA, 461 bp, Oryza sativa
  unsure (1)..(461): unsure at all n locations
tgcctactggttcacaagatctcctaatatcagaatctggtgacgtacctcagatnaatacatctaaaggagattttatatccagaacttctaaagaagacgcacacatgacaggagaaaaagcaaaacaatcgaaagtcgctgcatcaccaaaacaaaatactgttggaggcttttctgatgacagcacgccaacattggttgacgttgcaaaaaaacaattttctgaacatgaagcttctacttcatccatgatcacgacaaagggttttgctgacaatgacactggtgaaggagtgatcgctggcacctcttcaatgcccatcatcacagagggagttggttggactgctggttcatatgagtggagatacgatccttcaggtgctatgaccccttaccgtcatcctcatacccaggtaatgatgcctcatgaggataccccagcaatcctagaatca

SEQ ID NO: 76557 - DNA, 434 bp, Oryza sativa
  unsure (1)..(434): unsure at all n locations
actaagctatcgacggctctttttatgcttccgaagttggcaggggcgtgttaccttaaggtaatggcctacaaagctctatgcttggggcgttatttaaagaggctaaatatctcgtatcaacatgatttatagaagtataaaggcttcactcctaaagaactgatctttgatcggatgccaaaaatcatatttttagccacgattcaatagctgttagctcatgtcaggctatatttagtccacgttggtgttaccaacccggactaaagatgcctctatggttagtttaaaaagaaaacatcgccatctaaattagatgtgtgtagtaggtaggatggtaacgcacgtaanggttgagatgagagatctttaattcgaattctacatcccacacatctntttgacttaatatgcatctttagttccgatta

SEQ ID NO: 76558 - DNA, 454 bp, Oryza sativa
  unsure (1)..(454): unsure at all n locations
tcgcccaacacgccatgccatggcacgcacgtcgtcctcgtgtcagcctacccctgtcagctgaacgcctccacgatgagtcagccctacggcctcatccccgctacgtgcacgggaattggcctcccatgctgccgcgcccttcctaccttgttccgccgccacgcaatcgcgccccactgccacgtcacaactgccggctcaagaacggcctcccacaccaaggaggtcggatccgcacgagaggtagctggatctagctagtggacgccaaattcggtgacgccgcctcgccatcatcggcctggtcgacaccaccgaacctttgtgtccctttcggctccagcccagcgccgccatggccatcgctgtcccggatccaagctggtcgtggactccgaccccatgacctcgtgagataggcctaactggcaccgngcttgtgggcgtgcgg

SEQ ID NO: 76559 - DNA, 459 bp, Oryza sativa
  unsure (1)..(459): unsure at all n locations
ntacatagctatctacttgtggccacgtttatgatgttgtatttccatatggaatgattattgtggctcacttaattttgttgttgtgtacacctttatgctatatgcttagaagtacttaactcttgttgaagtcatctattcttgcacgaggaaaatatttgcctgtcataaacttggctttccttcccagattaaggttggtgaaggactatccactggtgaatatatggtagcactacggatctattcagaagattgtattgcatctggtgttcagcaacaaagtgctcgtacctgtgctgctgctggagaccaatcttcacaaaacataagaaaggtggaatggaatgaaatgttcttctttaaagttgaaagcgaagtgtgtaaattggaaatatactaaaataatatgctgcacttactttacatggtatttgttctcgtgatatgggtact

SEQ ID NO: 76560 - DNA, 447 bp, Oryza sativa
  unsure (1)..(447): unsure at all n locations
tcgaggggtcggcccctcggctcgcgttcgcccncagctccgactatgatggcgacgccagcggttatgacgacggtggcgacgaggccggcgacccgggcgcattggaatgagcccccaggcccccgccaatctccaattttttctttttctttcttctttttgtatagatcaacttaatctgcaatcaaaaatgatgaaaaatttctatgttaactttatttttctatgcatatgagttgaggatgatttgtgccgtggtccttttgcattttagcttgatttaagggctcgtgctcaagtcccgatcctcaaatggctcgggtcggggctagtgcctggggagatccacatgtcgagactggccaggccgggaacatggggaccgacggttattggtgacccgattgtgggtttttgcgattccccccggagtcaccacgcccc

SEQ ID NO: 76561 - DNA, 414 bp, Oryza sativa
tggtgacctagcgcgtgttggtgggatctgcaatagttcatgagttgatttcattatttctttataaatatgaatgggaacaggttcttagtgccatacaaaaaatagcatatgtataatgaaactgaacacccaaaaaaaacattataaaccacagagaagttgtttatcatgttctgaactatgaatagtctagcttactgtaaaatggcaaagctggttctgctagcatacagcttggatggagaagaccaagtatttgtcagtactccgattaaattaccttacaaactacaaatcttggtgattactccgtcaaaacatatagacatattatgatggatgatttgaatacattaggcaggtcacggattcaaaaccatgaaaactaaatacagaaaggtataaactgac

SEQ ID NO: 76562 - DNA, 447 bp, Oryza sativa
  unsure (1)..(447): unsure at all n locations
tgcttgagacatcttctgaagaaaatcttttttgctactctgccgcgataatatattggatcttctgaagcttatccatgaattgcttgttgatcaaatcggaattaaactattggtatgctaatgatctgaataatgtgcccagcaagaaaagatatggtttatttatgtatgccttcactcattctgctcttttgtaacagtttccttcacctggcttatctgcacaatcttcatctgatgactctctaatagaggacattaacacctctgttgttgaaatactaaatgctgagggtagcggccaacttacaaggtaatacatctcatgactgaactcttctgaatatttaaaggtgctagaattgcctatacttctagttaagttctatacacccaccccaccacacctaggaccttcttgattntatggacatagacatttgt

SEQ ID NO: 76563 - DNA, 202 bp, Oryza sativa
taaggtcaagagaaaaatcttaaacattatagtattacctatatgtaaaaagatgtatgcatgtgggtccaattttatgattattgtgtatctcatcattgatgatgcctttaggccgctacattgttatatttgtattaaaaaaactttaaagaatctgtgatatccctgacaattacttttattcttgagtaaattgcat

SEQ ID NO: 76564 - DNA, 380 bp, Oryza sativa
  unsure (1)..(380): unsure at all n locations
ntattgaactcggccaattacatcaagctctatgtacatattgttcatcttacagngaactgtcatacctgagctataacataaaaggtgcatatatacacactgtttagcttacagtaagctacaaccttgcaggtggtttttactctgtattttctagcagctttggggagggtggtgtcaagcgccgcaattgcttacgccggtaaatatacctcattaacttacttatgatccgatttattcctgcatactttatatttatcacttaacacctctgtgctctctttctctctgtctaaaatgatatattgcccaacttgttgtgaccagcgctctgcatcttctgcctctacatgtttgcacaaagcactgatctt

SEQ ID NO: 76565 - DNA, 398 bp, Oryza sativa
  unsure (1)..(398): unsure at all n locations
cttgctgtcatgcagcctcttattaagagatcttccgaatgttggcaatattgcgaaagcctatctcttcagaggagcgatcgacgttttaatgggatgacacaatttggaaaagtataaatggtaattagcgcttgtgtgtttttttaaaccaaatgcatgtaactcccacataatttattaatgaataagtcctacataatttattaatgaataagcccgtctggcctcctgaactgtcaagagactagtgcactgtttactatattgactatgttaaacaaatttctttgctatccgtagattgttgtgttcatgcaaaaaattaaatgcaactttnttatcgtctttgcctctggatcattctacatccaatcagttnttctatatattccgac

SEQ ID NO: 76566 - DNA, 417 bp, Oryza sativa
  unsure (1)..(417): unsure at all n locations
tctgtccttcaagatatcccagnctcaattcgtgcgattgttatgatatgctttatttaattcttgctgctcgttcaaaaaaatattaaatttttatttcccacccttgtgtgatacagttntgaaaactgtattcgtgtaagtttactatactgatgcttctgtacacatggtatatcaactttcttcttatctgttgtgattaacaatacatggcattaaatctgcagatttcacaaacactgtataagccatatatcgaaagcattccactgtttaaaggatgttcagcagaattcattcaacagattggtagtacccctctattttggtcagactacaatacatggatatttcatatcaaattcaatctggattttcttccccatattttctctaacatgttctgatgtggca

SEQ ID NO: 76567 - DNA, 410 bp, Oryza sativa
tactaagcttgaagagaattgttaaggtggctgatgatctttctccgtcaatagtctttattgacgagattgatgcagtcggaacaaagaggtagagtagtgcatacttcaaatgggaagtcttctatatgatgaatgttgtttgtgtatagtaaaagattggtggaacttcccatgaaatagtttatatgagtattgatgaacttttttttttctccttataggtatgatgctcattctggtggagagcgtgaaattcagagaaccatgttggagttgcttaatcagctggatggttttgattcaaggggagatgttaaagttattttagcaacaaatcgcattggaagtcttgacccaactttgcttcacctggctgatagacagaaagattgaattttcgttccaga

SEQ ID NO: 76568 - DNA, 459 bp, Oryza sativa
  unsure (1)..(459): unsure at all n locations
nggtagaaatgaactatctggcaatcctgggacacaattatgattatattcattgctagtgcccaaagacaagttgggaaatagatccggtactgacttcaaatgcttaagtggaatactgtcttccagactaaaattaggaagacccagtttcccttgaaatgaaggaatggacgatacacgattntctacatgatcaccaatcccctttccggatataggaggaatctgcacacaaaaaccttgtcattctttttctttaatgatgctcttaactagataaaacatcatatatgctgtactcaagaatggattctttttttctcaattttgcatccataaaaaatattttacaaactaatattagggtatgttgcaccattttctcctaataagtataaagtggacaactatcttatatttttcacttctgaagaaaagcatgaacaacgataagca

SEQ ID NO: 76569 - DNA, 447 bp, Oryza sativa
tactcaagcttgccgttcgccttgggaacgaccaccgggttcgccagccactccggatggatgacttcacggatgaatccggcctccagaagtctcgccacctcttcgcggatgaaggcttgacgttccggggcctgccgccgcactttctgccggaccggtcttgcgcccggccgcacggcgagacggtgctcaatcacctccctggggaccccgggcatatccgccggtctccatgcgaagacgtcagcgtttgcccgcaggaaggagacgagcgcgtcttcctatttgccatccaaaagaccaccgatccgcgtggtcttggatgggccgtcgcccacggcaaccttcttgaccgggacatcgtcgcatgtgtcaatccgctgccttcgggcggggggggcggaggggccaatcctctcgtcaccacccctcggcttggatgca

SEQ ID NO: 76570 - DNA, 441 bp, Oryza sativa
tgattgccaggttcatcttaagcaagagccaagaggggttgaatttgtattcatattgacaacaaaaatatggatgtgcattcttttatataaatgattaaaacccagcctctacatctaaacctaatatacgcagccaatttggatctgcatatgggtgaaatattctgtttaaaaaagtaaattatccatgttatccaaaattaaattctaattcaataagtaaacacacaaatttgtaggatattacacgagttgtattattcttttagaaaaaaaagcatgaatttatatgcttttcttaaaataaattattcaccgaatacatatctactttatttaggtggttctgccataagtcatgggtattattaaaccaaattggggctacgcttattgaactgaaagaagcattttttaaaatctgtatttggtactccc

SEQ ID NO: 76571 - DNA, 415 bp, Oryza sativa
  unsure (1)..(415): unsure at all n locations
ntggtggcacatagtcaaacgttggattgacaacattcagaagtgtagtgccatcctgagtactgaagttcatgcgacttgtgaactcgccagagtctatcacatcacatggtgatttaagttcattcactaaaacctctgggttgtgtggatacaaaggacatacctgcgatgtgaatgaagaaatattattaagtttctacccaaagatatagtgtttcaaatcattattagtgataccaggtgacccaaatgttccaacatcaaataacagctcttgctatgaatgaataatcgcttaagaaaatatctataactgccaaggctgaaatgacctctcttgagcatataagtgggatctcagtctaatgctgagcactattttctactcacaggccacatggctaattctcac

SEQ ID NO: 76572 - DNA, 394 bp, Oryza sativa
  unsure (1)..(394): unsure at all n locations
ngagggaaggcacatcgttacttagattgcccgatacggttaaccagtagccccggcgggtataggacgaaagtttgtgaatcattgtggttgggtcgtgagggacaacgtcctcatcagcataatgtactggcgtcgaactaggtcacgcggggatgaagatagctttctccctaacacagagaaggacatgttgtggaccaccatgctggagacattcacgatccctgaggcagatcgtcccagatgcaaagaatggaccctgacgaaaatggcagagctattccagagctacaaatcagatctgtacaagacatacatcctcaagggcttgacacctgatttcaacgtgcataacaagcttatggatcactacgatgccgttgtggcatac

SEQ ID NO: 76573 - DNA, 338 bp, Oryza sativa
tatattcacatagacagtattaattggttggtaaatttgctacaagacatcacgacttcgtgtttttagctgtacgacaccgcgcatagtgactttatagggaaaacactttcacaagctggatatttgcttggggacaccgcgcccattaaaataataacttctctgttgaagaggagagagaaatttcatgaaatatcaaaaaaacccttggtcccacatgttaactctcctaactctcttctctctctatcttcattactatcgccgatcgcgagcactttctggaaccgtcgttcgtgagctggtggtcctatgacggcgcgctcaccggcacc

SEQ ID NO: 76574 - DNA, 354 bp, Oryza sativa
tcaatgctagccgtcagatggaccagatccaacggttgaaaatgatcggtaccaccaggtaccgctttattcacttaagtggtaccgcaccggtggaaaggtaaggtggtcttttcgcatagaaaattttgggaagtcgattagagcagcgtctttcctccccaaatggctagatgcgtgctgttgtcgccaccgctgtgtgaccttggtcgccgtcgccgccgtggtgtcatccccatctgcagatgagacagaccaagactagaacacctggggtcgtcgtcaatggagcagcccagcactcactctctgtgtgatatgccccatagcgggaggtggagggccgtgcccatg

SEQ ID NO: 76575 - DNA, 381 bp, Oryza sativa
tcctttgctttctccactcaaatctagagcctatcttgttagattgtgagattagatgagagtgtaggagtgttttggagatggcttgaagattacgtttgactgagcactttggatatcttgtgggctgtcacttgggcttattactcttggagatcttctcctagacggttaggtgttgcccgtgacttccaaatatcttgtggatatcccgggaaagtttgtgaaggttttcctcacctccgcaaggaaatgaggtaagtgagtaaagattcttgtgctgagttttcagaggttatcctacgtagagcaacttgcacttgtggtcttttctagaagaaattttgagttggatcttggtggtcactcaattctagaaaa

SEQ ID NO: 76576 - DNA, 424 bp, Oryza sativa
  unsure (1)..(424): unsure at all n locations
ctaagcttactacttggcgccggttgacaacaagagcaaggttttaaattaaggaggaaacaaaaaagaaaaaagttcaaaggtgtatgacaagaaaaatggaaattgttcaaaggtatatgactgttggaattaatacacgggctaaggcccattcgaagattaattctttggaaaatcacaaaagcccacctcataagatggcatgcatgtggagtttagtaccaccttgcttattctaggaaagggggacctccttaaaagggaggatgccctcctagccatttgaagcatgtgtggtggagagaagaggggaaacacacgcgctcgctcacctcgccgcagtctccttttggcagttttgtttgctgcangaaattccgaattgttttgttttggaaacattccgaaaatccggtgcgtg

SEQ ID NO: 76577 - DNA, 354 bp, Oryza sativa
  unsure (1)..(354): unsure at all n locations
acagaacctaatgtacacaggtgaactacctgagctccctccacagcctatacaaccgatgttcgagaaataatccaatgacaatgagtcaagaagaaatcaagttatcatcgcatgcctcgtttgcgaaacaacgcatggtagccgctgaggagtattctctccataactgaagactctgtctataaatattactcttcaggtccttttccttaccgagcacgggcagaggatggttgtcatgatgaacggccaaacctgtgttaacatttctgtttcccaactgcagagagatctagccaaggaccggaccaagtatgaacagagcttntctcttgtgtaaatacaacgctt

SEQ ID NO: 76578 - DNA, 441 bp, Oryza sativa
  unsure (1)..(441): unsure at all n locations
cttcctttcgtttganacctgtgcacacctcgcaatggcgtgantcttttatacacaaagtcatccactgcgaattccagatcacggcgacggttatctgcataacttttctgccgagactgtgccacctttagattatcccgaatgattctgactttagcttcagcttctctcaggatatcagtcccgaacacttggctttctccaacttggtcccacagtagtggtgttcggcatttgcgcccatacaacgcttcatagggtgccatttgtatgctggcctggtagctgttattgtaggagaactcggcataggggagactcttatcccaggtcttcccgaaatctatgacacatgcgcggagcatatcttctaggatctgatttagacgctcggtctgtccatctgtctgcgggtgatatgcggtgctgaaattcaat

SEQ ID NO: 76579 - DNA, 421 bp, Oryza sativa
tataaaactcagcttatcaccttccttgctcacacgttcttgctgctgccggtgattgtggcatatctcccaatgtgtacgtctcaaattatttcatgaaagaagcaatctttcatacatggagtgaggagatatatgggttcgggatctcagaatcttacacaacgctgagtgcccaagttttttatattccagatccatctaagtttagggtgaaaaagggtcgacgccaaactagacgcatcagaaatgatatggatgagtcagaagcaggtgggaggactttacgctgcagcaagtgtgatctgcgcggccatacttacaagaaatgcccgaagaatgcagaagttccaagcggcgcagatgctagtccatctggacaggcaagtgatggtaggcgaccacatggtgaatgaacaac

SEQ ID NO: 76580 - DNA, 399 bp, Oryza sativa
agctcttcattacctctcattggcaggacccgctccttttatcttatattctcatgcactctaggcgttcatggttctagcagtgagaggagttctggcgcttctctaaaaaggaaagcttacacacatattaaattatggttcaagttatatttcttttctcacacactcatggtgagcctaccaatggcgacaccaatgtatggcatgccctccggcctacctcaacgggttgtcccaccgtacgcacttgtctcactcatgggtgaaccatctatgcaaggatactgtctctgctcggctatctaatacgctaggtatatacccattccagaagtaccgttgtacaggagtcgattcatgcttaacatcatggctcggtccttaattgaccgggga

SEQ ID NO: 76581 - DNA, 445 bp, Oryza sativa
  unsure (1)..(445): unsure at all n locations
tgtcgttggttgtccacatggacgttctccgtcattctgttcgtcgtccccaactacgctggtcgtcatcctcagcagcgtggccgttggggttgtctgcttgtcgcccatccgcatgaggcttctggagagtccttcgtgagcaaagcagcagatagctagaaacccatctatggatcatttaatttttcctatcttggtcctgttcccctttccccttttgtgcaatccgtcatcaccgatagctctttgttgctaatctgctgctcagctgctgcattccaatcacagtcgccaacttcttcgtggcaatgtcacaaccttttgtacgtcttgagtagttcngttagtactaatctcctgctatgataactccattgattaccacttaattttagttgcagaatctgtcaaaattgatgatttgtttcatgtcttcgagctt

SEQ ID NO: 76582 - DNA, 459 bp, Oryza sativa
  unsure (1)..(459): unsure at all n locations
ntatatagctgccccgctgactntntaatatagtcatggtgctgtttgggtntttaagcaattgattggatacaatatcgntgctntttgccacgtaagtgtgcatttttattgaccaatattatggcttaggctgattatatattgtggtcatctttcaggcggttggtaaatcctttatgagtttatttactcggattttataccacatatgccatatatttctaggtgtggtggaaccatgtgtcttctagggacttaagcacatctgttaaagcagtgtgcgcatggcgtatgcccaatactttggaaatttctttattcacaacatacaagcttctttatangctatttgctatgtgaattttcaataatgtagccaactttaagttacactcatcatatattacaaagcagtcggtatatcactcggatcatgttattcanggatttacaccc

SEQ ID NO: 76583 - DNA, 444 bp, Oryza sativa
  unsure (1)..(444): unsure at all n locations
tgggcctctgttganagcactaccgtacttccacatgtctagtgggtaaggcttagtttgtggctcagtctggttataaacaaaagtacacggattggagatggatgaagtcgggggtcgatggacattctccagggcaaatgaaggctacacgagctgcggcccggtagtcgagatgtcatggcagagggttggtgccctgctgctaggggctcagtcttgcctgcctgtcccgggggttccggccgtaagcgggattgggtcggtactcttgtctatggctaggatgggttggaaactatgtcacgtcttccgtctgtataccgtggtggtatgtggcacgtggttacacgtgaggaagatgtgtcttgtgggtaaagatatacacctctgatcagagtataatctattccaatagccgcgccctctgttatgggcaaagcc

SEQ ID NO: 76584 - DNA, 449 bp, Oryza sativa
  unsure (1)..(449): unsure at all n locations
tacaaggagaagagaagagctactagagccatacccgaactcttccaaaggcttccggactccgatttctactctattcctattccactagcttaagaacactaaactaaacttcagagaatatgagagagctttgcttgaagtgtgtgagtgaagtgagaagaggagctccttaaataagctgccaatgatggttgtggcagttggaatggtcggaattgccctccaaccgtcattggggagtgatccaagccatccaccagaaaccctgcatccaacggtgctagggggttcggccgaactccctggttcggcagaaccaagggctggcccaaccagcccaggttttggctggcggcctcctnncgtggttctctttgcagacttgtgaatattggcccaattcatcgtgtcattttgagttcttggcccattcatacataagtctg

SEQ ID NO: 76585 - DNA, 441 bp, Oryza sativa
  unsure (1)..(441): unsure at all n locations
tgntgtttaataatgacctaagcttagatatgtttgcttctaatatccgaagcgacggtggccagtggaagagaggtttcatgaatgattgcgtttaatcttttttgtccacgaccgacagtatagacgctgtgttgaacggtgtggatcatcacccatctctgatggagatggcacattggagattatcacacagtgatcactattcaagagctatcatcgcgaacagaagaatcactcacgacattattggtaccagccatctattntctatataagagggtggaagagacggagtcntctgagacctcgtgcaatggagtagatgatgctcttatgctaatctgttagacacgtagcctttatccctgatattgacatgcatatgtgtagtttacgaggtttgttcacatttttaggtcccatggtcttgttggtgac

SEQ ID NO: 76586 - DNA, 421 bp, Oryza sativa
  unsure (1)..(421): unsure at all n locations
ngacattataatgtacttgaagaaccacacaatattgctctataggaattgtattaaccccggtccctgaagatcctttnttcataaattgcaaaaacaaaattatggctgtcttgttgcttaaccaccagaaaagcaaccttttattgcaatagacatggtgcacagttaacctccacattccttttgacttaaatttttgtgtgcatgcagaaaccgtcatggtgcacagttaacctccacattccttttgacttaaatttttgtgtgcatgcagaaaccgcttgtcttatgagcagttcagtgccattttagccaatgtaaaggagttgaactcacaccaacagaccagagaggtataaaactatagaaactgcacttactgtattgtctactatatgtgaatcctgatctccctttt

SEQ ID NO: 76587 - DNA, 283 bp, Oryza sativa
agcttcttgggcgaccgtggacgtcgccagtccactcacgggttgaatcttggtggcgtccatggcgaccccttgctaagagacgatgtggctgaggtacaggacgcttgggtccccgaacgaacacttggagcgcttgatgaagagcttggccgcccgtagcacagtgaagaccgaacgcaggtgctgcagatgggccgtccacgacgggttgtagacgatgatgtcgtcgaagaaaaaaaggacgaagcggcggaggaacggccggagtacgccgttcatg

SEQ ID NO: 76588 - DNA, 355 bp, Oryza sativa
  unsure (1)..(355): unsure at all n locations
atgttgaactgactgagtntccactcttgttctgcacctgcttgcagcaagcggaaataaaactgttacaatgacacgagaaaatcgtatcataaagcaggatgaactaatacaggtgcacggcatccaaattctgtcaatactttggtggcctacactcatttactgatgtcttatacagaataacactgaaaacagtaaccgaaaaaagaaaagcagtaggatgattcattgaagcctgtatatgcctgcatcttatggagggaaagctatcttgggcagttttgacacaagatcaagtttgggggtgcttgatctaaacatacatcaatatagtgcgaaaagtatcactaca

SEQ ID NO: 76589 - DNA, 426 bp, Oryza sativa
gcttgagaccagctcatctgcaatatgatgtgaggaagcaccacttgtaaatcctaattggaacatcaattgctccaagcgcttgaaatttgtgaggtaaagatatccaatctaatactccctccggttttaaatatttgacgccgttgacttttttaaacatgtttgaccgttcgtcttattcaaaaaatttaaataattattaattctttttctatcatttgattaattgttaaatatacttttatatagacatataattttacatatttcataaaagtttttgaataagatgaatggtcaaatatgagctaaaaagtcaacggtgttaaatatttagaaacggatgaagtaatagaaataccaccaacaatgcaatgattagtcttctcaacgaaaatagtgaggggtagtataaagtacaac

SEQ ID NO: 76590 - DNA, 442 bp, Oryza sativa
tagaatactaagcctgccgttcgccttggaacaaccaccgggttcgccagccactcttgatggatgacctcacggatgaatacggcttccagaagtcgcgccacctcctcgcggatgaaggcttgacgttccggggcctgccgccgcactttctgccggaccggccttgcgcccggccgcacggcgagacggtgctcaatcacctccctggggaccccgggcatatccgtcggtctccatgcgaagacgtcagcgtttgcccgcaggaaggagacgagcgcgtcttcctatttgccgatcagaagaccaccgatccatgtggtcttggacgggccgtcgcccatggcaacctccttgaccgggacctcgtcgcctgtgatcatccggtgcctcagggtggcgggggcggaagcggccagcctctcttcgccaccctctggct

SEQ ID NO: 76591 - DNA, 415 bp, Oryza sativa
agcttcccactgatggactcatccaaagcactttctgcattctcatacatcataaaaaggcctttctgcccactaaccttctcttcataagtacctaaaacaaagaaagggctaatcaaatagaacttctccctacaaattaccaatttcagataacacaagaaatgaccaccaacctttgcttcacaatgagttcaagtgcctgcttgatgttaccaagaacaaggaggtttctatcgctctcattaaacccagccgtcttaattgatgccagaaatcctctgaaatgttattggcaaacttcagaaatataatcgactgtgaactttttctgactgacctactgataaaacggaaaccattatcttatataattttccaccggacagatgaacaatgctaatgacaactaaag

SEQ ID NO: 76592 - DNA, 357 bp, Oryza sativa
ccacttgtgttgatgaagacaccccttgtgtggctccctaggacttacgtccccaagagccaaccatttgtatgcttcgctcgggtcctcctcttcacctaacacatgtgagtcaacttactctactctgaagccattacttttgtcaaatgttacatcacgcgcgatctcaacaatatccgaggttgtgttgaaaacgcagtatgcgcattcatttgatccatacccaagcaagaatccctcatccactttatgagcgaacttagatgatctatcctctttatttagaatgtatcactgactaccgaaaacacgaaaataagagacattatgtttgttacatgctataagctcaca

SEQ ID NO: 76593 - DNA, 435 bp, Oryza sativa
  unsure (1)..(435): unsure at all n locations
agcttggggacttcggcgtgtctgcttgtatgtttgatatatgtgatcgacaaagatctatgaacacatttgtgggaacaccgtggtgtgaaaaaccattnttttcttctaatgaaattaaataaacattatggaacttgagaatgctgacttggtttgtggctctaattttgcttttaggatggctccagaagtgctccagcccaggcacttggatataaccttcaagtatgtttacattgaatatacatggcatatgacttgtgtgtatatttacatcgaattatacatgcctcaatgcaatcctgaatgtaaatgaagcatattctttgttagatttggtgcaaaaaatacagccatcacattttccacgaatagatattatacatggcatacttgcattngtattattcccgggatgcgttttttttttca

SEQ ID NO: 76594 - DNA, 329 bp, Oryza sativa
  unsure (1)..(329): unsure at all n locations
gaaccactncgcgggcgcgcaccgacagcgacggagcttttttgtttcggtttgaggccacgagaggcggcttttgcttctgtgcaccgttaaaccagagccctggtggtgtactgtggaagctgtacggtggacggggtgcggtaacgcccgactaggctcttttgcgcaaacagaactgctcggtgacggctgattcggctgcaacagcctgctggagggtctccggcgagcggcggggcttgggcttgcgtggggagcacatgaaagggcgcgaggagctctgtgaagaatggtaaactaaatttaaattacggtgaggttttgat

SEQ ID NO: 76595 - DNA, 281 bp, Oryza sativa
  unsure (1)..(281): unsure at all n locations
tntaagggtcttggtctctgcccgaagcattaaagccattcctgttaaatctggctatagagcggatgcgcccgcccagcaaacttatggatgtgccatgcgttaccggatggatgggcgccctaagtccgctcatattaaagctgggagagaaagcgttacccttatttaaactctcaaacgcttccgaccggttacctggacggaggaagccggaaatgccctcacccanctgaaagcgtatcttagatctcccgcagttctagtcgccccggagccag

SEQ ID NO: 76596 - DNA, 369 bp, Oryza sativa
  unsure (1)..(369): unsure at all n locations
agcttggcaaggaggtcagcgattgtcttgctatctgtggtagacgtggtcatcgccgcatagtcggngagggtgggatcgctgtgagccccgtgcaagtggagagtgttgtggactgttgtggcgatggcctaagaggcgtcgccgatggtggatgattgtggagactatggctcagactgtgcatccgttatgacagtgaacatgggagagagggatggagttctacggcttggtggcggaagcaaaaacaactgatacgatattataatgagagaattgtacgcgataattctattgatcacaaagcgtgtttacatattgaccgattaccactcaaccgatgtataaaacagactctggagaata

SEQ ID NO: 76597 - DNA, 451 bp, Oryza sativa
  unsure (1)..(451): unsure at all n locations
gctcaaacgacattaaactccctttaccacaattggtcaagtgtacgcgctataatttcacttccgccttatgagcgttgtgccaggctcgtctgttatgccgcgctctacaagtcttagttccacgtacaggcattaaccatgatagtccccatggaggaccaagagtacccatagaggttgtatactggctttgggatcgangaagatctgnatgaagtctaatatgtacctaaagttagaaagcactgccataattctagaattagaatgtctttaagcaaataacggaaattagataagatgttttaaagataacatttggtatcatagcagagagttttgtcttacacataattacgtcccatactgcaattggatgagcggattggagatatggatctttgaactgacttgaactaatgagaatatccggtacatataaatattg

SEQ ID NO: 76598 - DNA, 419 bp, Oryza sativa
agcttgtcacatttttatattccttcctcctccatcccgagccattgctgcaaattggaggtggaagggagggaggtgctgtccaaattttttgtgaatgtgttttggtgataatatacaaatcagagggatcgaaaatgttagtaactccattctctaatgatgtatgcttagcatattacatttatagctttgtgttctatacattattgtctctaacaaggtttatgggcatgggtagacgagggcgacgaggacctcactgctccctagtcctacccacctaaccatggccaccgacaagtatagagagtaagagatgagatagggtagagggggatgtcaatgccacgtgggctacatgccacgtatgcgtcacgttaaaaaaaccaccctccgagtgccttaagatctgtttt

SEQ ID NO: 76599 - DNA, 428 bp, Oryza sativa
  unsure (1)..(428): unsure at all n locations
cagcagaagctatagaatgactcttctctaatgttgtgctatagacttaaaccatctatctaatctatactcgagaactaaagttaaatgagattaacttatatgattgaactcccagcttcggcaagaactccaagatagactctgaaaaatgggggttgaagcaagggtgagtacaacgtactcagcaagctattatattcaataataaatgtatgaaatggtaatatttgagtagagctatgtttaattgcagaaagctgagaataaagaagtagaaatcctgaaatgtttgatatgcaacagtatttaataaagtatgaaattatgtntctaaccaagatgccatagtgagtcccaatgctcgataaccgcgagcacagctattcgaattagttttgataatattcatactgcaggagatgtac

SEQ ID NO: 76600 - DNA, 413 bp, Oryza sativa
tagcttgccagattaccgatcaaggtggttggtttttgatttgtgaaaactaaaatggcctatatttatgtgaggatttgattcttctatgtggcatgaggtaaccctgggtcggcttgggaaaggctttgttgcgaacctccgataccgatgggtgtttggaataagatctgttcttatgggttaagtgtacccctctgcaaggttaacttactgttcgaacagccgtgcccacggtaatgggcggatgtaaagtggttcccgttgcgtagatttgtttgcttgtgcttggtgaaaagttgttgtggtgtgggaatcgtaaccagaatcagcctatgtggcagatggatgacctgagtggtcagaaacgactctatgtgattctggatgtctgctggcatcatatactatgc

SEQ ID NO: 76601 - DNA, 455 bp, Oryza sativa
tgcaatcggggtctagggttgcgaaacggccgttggatctaggtgttcaaatgggtggggagatgggtctcggatcgaatggaggtggccgggctgtgagccatgtgcatgatgaaatgccacaccggaatgtggatagttcggggaagcgtcgtaagatagggatggagatcccatacgtctctgattcagagagtgacaatgatgatgactgcatacttccaggggaggatggcagtatgatgccggtacagttatgcgctgcttctgatttgattgaactgaatctgttcaccatgagcatgggcatgacagatgaatggagaatgggtgattctgtgaagacaggtaaaaagaaagctagtggagttactatgtgagaaaatgacattcccattgacgagcatgtgcacagacagagttcggcaattgtgagagtattgagctattacatc

SEQ ID NO: 76602 - DNA, 416 bp, Oryza sativa
  unsure (1)..(416): unsure at all n locations
agcttcatctagaatttgggggtctcctgtagttgtcaacagaccataccttagaagtttcctcagagtataccttttgttttcttatacctcaatggagatgagtagttggccatgtaggctgagccacagtcggatccgaagtaagcacaaaagatccttcactgtcatcgccatgattgctaaggaattgggacgtgatagccgacgattgatcctcctgctgttgagtaagcgaaccattgacatcctcgtcattgttgaatgagagcgcangcgagtgctcaagtgaggcaggggtatcaccctcgggaattgagccatcaaagatgttgtctccgggatcttctgtgaaatctggatctgctgcatcttcttcaagattttctgcagtaacttggttattctattcagta

SEQ ID NO: 76603 - DNA, 395 bp, Oryza sativa
cgccttcgagtgtgttagcgtgccagttgatttgatccttcaatctacaagaaataaagacaaagaaaccgcgggtaaatctataaacgaaagccgatcggctatgtgccgatggcatatcatttatctcttagccgatgtcatatgtgaatcgatcggcagttataagtagataataaagaactaaatctactcgatcggctgtagatattaccaacatataactcttatatcgatatatacttaaatcaagtgattgagatagaacggtcgccatgccgagacagtataaatcacttagaacagaatatatatttataacaggactatatatgtgtatagcatagccgatcagatagaattagcatgtatcggctaatactccgatactactc

SEQ ID NO: 76604 - DNA, 438 bp, Oryza sativa
agcttgggatttaggaacccaaacttgtctaagtttgggtcccttgatgttagttaccaaagcctttggcacccacacacaagtgcggtactcatcattctaattcccattaaaataagcaaccactttgccctctgaatttttgaaaattacatatgaatcatagtaaagaccatctggccggaacctcctggcattatgcccggaacttccggacatgtcttgtgcacggccattggcccggaacttcctagcaaaccggtcggaacttcctggtgggaatttctgagagacagagactcccacccggaggtttcgcccggtttgtccggatgttccgggtccctggcggctcacaagactagtcacctcactttcttgtggagctttaccttctctcattaacatcaagcattctatcccatttaccatcacacc

SEQ ID NO: 76605 - DNA, 393 bp, Oryza sativa
  unsure (1)..(393): unsure at all n locations
ngcatacaacaaggaaaaagagatgtctgtacaacactgttcagtgtcgaatgtagacttattagaacgacatgaggaaaatcgcaatcccagtgataatgttgaacggtggtgatctgatacctgctgactctagagttcattctcgcttcttggtcctctcagactacgaaatagatagtatgcgcacaattatgcaaatagacatatctaataacaagttttgtgatgggttggactcttacctataaagagttccgagtatagccacggatatacattcaatgtgctttcgtactgttagtaaaacgttccatgccctaatcactgataagcatctcaaggtacaacctgatgattcatgtgtttttggaaaaactattgtcggcttct

SEQ ID NO: 76606 - DNA, 422 bp, Oryza sativa
  unsure (1)..(422): unsure at all n locations
agctngcattaaacacctaaattcccgtgacttgctgagtacgaaagtactcacccttgctctatataaatatatataggtcctccgccctgaagttgaagatgaggtgaagtgaagattaaggtttcgtcctggttcccagtcgtcgcctgtggtgttgggtgttaaaccgttggttccgctgctgctggttgttgtggtggtcgcctcgtccgtgtcgtcggttgtattctcgggctgtctgagttgcaacctaagttaaggtaaataagtcctctatttattttaaggattgctatgattcatatttgtcaccgtgggtaccagcactatgtcctgggactggtaccgagatcgcggtttcgtaagaagcggttcgcgccattatccctatgacacgctcctgtcacgtgccgtcgtac

SEQ ID NO: 76607 - DNA, 456 bp, Oryza sativa
tcagataaatggacacgttcagaactgttctgtctaattttcagagaatagaaatgttcagaacctagatgtgatcactgataagtctttgttcactgatcactgataaggatgtgctactgtttaagaacctgctcaaggaaattgcatcgttgagaagatgcgcgaaaggtcaaacatgggtgttgaaaataactagcaataattctagctgtagctgactggaacaaagttttggttagtgtgcgtactgcataaatttaatttcattcacgtagaagagtcaaatttgattgagggcgggaaatgtctcttaatgtttgttttttgaaaccctttggcatgactagctggcccattttgttgggaagaaacaaattctaaacaagaacatgtcatgtgacgagttgttaatactggaatacatacatttgtgactggcatgactgcaacagt

SEQ ID NO: 76608 - DNA, 454 bp, Oryza sativa
  unsure (1)..(454): unsure at all n locations
gtacgaacaaattatccatcatttntctgtttccaacagtctataaaaattagtacatgaacgatatagtgacaatctattaaaaagctagtaactagctggaggagatcgagttggagtgtgtatatatacataactattgtgaaatgacatatagcctagtagtcacagtgaccacctcaagattctgagttcaaatctccataggagcgaatttcagattggggtatgtaagggctaatgtcctaatttaaaaaggttgaatatatccgcttggatgtagaggccgggtaaaaataccattctctctctctatatatatatatataggtattattctctcttcttttcaaagtatgatgatgaggatgatctaactgctaaaatatcaagagaaaattaataaaggtttagtttcaaatttgctagtgctgcactttatatgcaggaggat

SEQ ID NO: 76609 - DNA, 424 bp, Oryza sativa
  unsure (1)..(424): unsure at all n locations
cagatggagagttcttgtttgtcgcatgtcgtaaacttgagacgacggttatgcaactctttgtcaactacggatggagattcaccaatagactatagactggaataatgttctccttgtcctgtttggttttcctataatttggtttggtgtgattcgctttattttggactacacttttctagagtgctagattgtaataatggttgtaactctttggagcaaaggccggatgttactcattccattattaaaaaacagttggctttattattaaacttgcttttatgtgtttattatctcgacttagctggcaataataatggcagcaatacatcagntacctctggtatcatctttgtatcataatgaatatntctaccctttccatttcaaaatatgtngatttccacctttaaaattt

SEQ ID NO: 76610 - DNA, 459 bp, Oryza sativa
  unsure (1)..(459): unsure at all n locations
gtgggtgagaatggaggtgacactactaccaacccgtttgatccatctacttcgagagaagacgatccactgccttttctaccgcaccacatngccattctccttaattttctccgagccaaatcagattaaccggccaaaaaagaagaagatggacatactaccaatagcttcgtcctccacgcgttcactgaacaaacaggacttgaaggtccacattatcacatcggatattaaatgaaaccaagtactccctcctttttaaatatattacaccgttaactttaaacacatatttatcattaatcttatataaaagtgttatataacgtatgagatatatataaatcatgtgtgaaagtctctaagtgctaaaataactcacaacaaaataaactatcagtatgttatttctttaataaacgaatgatcaaacgcatcagaaaagtgaaagttgtt

SEQ ID NO: 76611 - DNA, 426 bp, Oryza sativa
  unsure (1)..(426): unsure at all n locations
agctngctngaggtgtgtgagtgaagtgaggataggaacttcttaaataggctgccaatgacggttgtgncanttggaatggtcaaaattgccctccaaccgtcatcggggagtgatccacgccgtccagccgaaacctggatccaactgtgctaaagagggttcggctggcggccttctctgttgcttctcttcgcagacttgtgaattttggcccaattcatcgtgtcaattctgagttcttggcccattcatacataagtctaattctcnacattgtccgattaatttatcgtctatgttgatgtcgattctcctccactttattgtcattctctgcaaaaaaggggtagtaacctaatactagtggaatattattattctaatatatatatatgcattgcaagcatcactagttctctattt

SEQ ID NO: 76612 - DNA, 385 bp, Oryza sativa
tattagaatactcttctatatacatttatgtgtttgttatactctccgagtgtatgagtatcaactatacattatgttcttattatattgaatatactgctagcttatcatggagatgctttggtgcgggtatagtgtttgcttatgcaattactctatgtcatgacgatgatattagagtagtatctggtagtttagacgtggtgtctatattacgggatatcattatttgatgttatatattgcggatgaaaggcgggccgctgattgtgacagctcaacacgggtattccttcgcgcctatatataatcctaagttaatttcctacggagggtattcctccgtatttagcctcagttggatggtcatgacaggttgtcgtaa

SEQ ID NO: 76613 - DNA, 429 bp, Oryza sativa
agcttcttgtagaacgtctcgccatcgatgtggtataagctcgccgtgcgcacctcctgcgccagcgcgcacggtcagcaaaagagccaccgggcgtagtccgtcaccgacggcgagccgcagcacgccgcgctcgccggaagcccgaaccgttctctcatctggatcctccagtagccgccgtagagcagcccgcacacgcagagcagcgcgccggcgccgccaaccatgttgccgatgaccacgtcgtggatgtggagcgccgacacgcccatcacccacagcggtgcgaagcacagcagcacgaacgtggcggtgtgcacgaacatgctgccgaacccgagccgctccatgttccacccgaagacgcataaggtgcacgagagggagagccaccacgccgtcgcgtctccgccgcagtcgaacatg

SEQ ID NO: 76614 - DNA, 336 bp, Oryza sativa
  unsure (1)..(336): unsure at all n locations
ctaagcttggcagnntagggagttgctcctagccagtgcagatctacatctacgtgtctgagccatcgtaagacaggaacttctggtcgtgttcaaatactagctgcattcagcactgcctgcgttgcatattataaaactttctagcattacacacattcatatatatggtccatgaatctccacatatttggtttcatatcaggggacattctggcgttggccatatgcatatatatgtccatgaatctaagcatatatgtgcttgaatcgacaacatatcatatgaaggtgcgttatgctanaaagctttatttatctggctgaggagcacta

SEQ ID NO: 76615 - DNA, 442 bp, Oryza sativa
  unsure (1)..(442): unsure at all n locations
agctntttctttngtcataggcttccttacaattgaaactacaacttcttaaatttaatttgattagattaaatttgtatcatacactgaatagcggtttatagtttggaattggatacaccgatctgaaaacaaattcatcaagataccagctaaagtgagcttataatttcttcttagctgaagcatgttgattccattgtcagtatcagtttatcagctgttcatcaccatcaaattctattattatacctattggtgcgcattactatttccataactagtattttntttactatatggacagaggccccctttgattcaatggaaaatcatatgaattttgtacgatttcattcctataggaatttttcctatatagctctttgaatcaaaggaacggaccatntgaaatcctatgaaattttatggaatgcctcat

SEQ ID NO: 76616 - DNA, 408 bp, Oryza sativa
  unsure (1)..(408): unsure at all n locations
tatanatatataggtgagttataataattctgaagccattgtatattataatatcactttcaaaaatctaaatcgaaatatttgaggagaaactgatggctgaagtttaaacatgttcacttcacgtattcgaaatatttactagttatatatgagtagaggaagtgtattgcagtgcggcggtattgatagttttttttggtccaatgctagaagctgattgagacgtgtcattaaaaagagggagaggttgatcactcgatcatgagttgatggtgctggtgcacagaaacaacaaactcgggcggttgcatttgcttaaagtggagcactcgtataggtgcatgttatgattgtggtgtcactgaaggtgattatcttccgaggcatgcatatttgtgcatttgt

SEQ ID NO: 76617 - DNA, 382 bp, Oryza sativa
  unsure (1)..(382): unsure at all n locations
agcttcatatggcacattntcctgcttttggatattataatcaggaaacgtcactgtattgccttcagcatttagttactcctttcacggaaccagaactgagatctactgcatcagacttattgctggtataataaactctctctctctctctctgggaattataagtggtgggaaacccctctctctgaagagatgtgtgtctctgtgaaagagaacctctaaacacattttatttcccacacctatttgatcacaaggagagtgagatattttcaacctgtaactcacgccacacacagtgtgggaacacaataaatttttatcttgtatatatcccccaatgtgactctctaagaatatgatgctctcacgagaaacc

SEQ ID NO: 76618 - DNA, 362 bp, Oryza sativa
  unsure (1)..(362): unsure at all n locations
agcttaattgattggggatctacatcacattcacatgctctctgtagncatatttgatccaaaaaaaaattgccgcatatcatctgcaccaatcagcactcatatttcccttaaaaatagcatgcatattagaactatatagcttgtagccatcatattataagacataatgacaactggtaccatggcttcctttcttttgcttgaccttatctaatcatcttttattttcttggtaggggatacgtagaatctatcaatcatgttatttgccaagtggctgatttaaaactattaacctggatgcactttaatatatgtgcctcatggtggttggtaaaaatggtccctggtttttataa

SEQ ID NO: 76619 - DNA, 468 bp, Oryza sativa
  unsure (1)..(468): unsure at all n locations
ggacacttaaaactaagcttgaattatacttactacacacaacacaatgataacctattgcctagtatatgtacaaggcggcctgagcctatatttgggctcagaaactttggttgaggcgttttcacccctgtattctctgaacctgaaactaaactaatctatctatttcatgcacctctttctggagttgcattaagcaaaccacttggtaaccacatctttttggttatttcagcctcaaaccataggtgatcaagacatgtgcaggaagcaataaaatgcaacttcttgccaagcagtgctttggagctacgagaatctaatccatgtatcgtgtcttgnggtgcgactagatcttacttacagtcttacacctcatctgagtaggtaccttgagcatctgcgacatccttgctcgcattggagggtcgcttttcttttagttcactgcacacaatgtgtgtc

SEQ ID NO: 76620 - DNA, 430 bp, Oryza sativa
agcttcttccatagcatacggctttctagatgtatatgatgatctctagacagatagatcttatatgaatcgtatgatgaagtaccacataagtggatatatatgaaaggaatccaaatctgccgaatcgctcatgttatgatcttctacatcctaggtctccgcgttccatcatctggcttatgttcttcatgtagcattcatatcgaatgactctatgaaattacgtcgatacttctacatattatgggtaacgtaggagacatccctattttcccccgggggtcttaattaccacagcttagctttcaattcgcctctgaccatcaaattaaatgtgaataacccgtccttctctctttgaaacaaggggcgcttggccgacaccgagagcagccgccggaagccgtcgtcatcatgcagcgaagac

SEQ ID NO: 76621 - DNA, 458 bp, Oryza sativa
tgagttgttgttatacaattggcagctcaaaccatcacattcttcattgcttgtactggatactggctcattgagatctgggtattgggctactaacaatctggtatcagaggcattcaattcactgggattcttgtcatggaattgttggggaggcatccatgaaagagggaacacgaattgggttggaaaagttctcatccaggcagcgcccaccaactgtttgatggaatgtctagccaacctgagatgcccaaggaaaatcagaggatatctgagcatgtacacaacaattccaccatgaacaaagatgagaaatggctagatgaagctctagatctgatatcggagaaagataaaccaatggaggccaaacacatgctagaggagaagatcaatcggatatttcaaaagtagtaagagatagacgttcgtatgatcaaggcttcacaagaaat

SEQ ID NO: 76622 - DNA, 437 bp, Oryza sativa
  unsure (1)..(437): unsure at all n locations
agcttactaaagacctaagagtatgacttatattctccacccgaggggtagtctacagacggtctattaccagataagactctgagtgaaacttgcttgcacaagacttgcaattcaaggcgtagtccattgttcaagttgtgagtaagtgtagcttggagttctaggtggatgttcaaccttaatcggtctccatcaaaccgctggtatataaacagtacattggaaaaggcaaatctcagtgggattttgagatttggtgggggattgttggaattaataaatgggctaaggcccattcgaagattaactctttggaaaatcacaaaagcccaccacatgggatggcatgcatgtgaagttagtaccaccttacttattctaggagagggggacctccttanaagggagatgccctcctagccacttgaagcatg

SEQ ID NO: 76623 - DNA, 289 bp, Oryza sativa
tcggatgtgcatcgactacaccgaccttaacaatgcatgttctaatgatccttacccccttcctcgcatagatcagattgtcgactccactgcgggggtgcgacctttgtgttttctagatgcatactctggttaccatcagattcgcatggctagggaggatgaggaaaaaactgcgttcattacccccatatgaacctattgttatacgacaatgccctttgggttaaagaatgcaggtcctacttttcaacgtactactcgaatttctttgggtaacccaatatga

SEQ ID NO: 76624 - DNA, 429 bp, Oryza sativa
  unsure (1)..(429): unsure at all n locations
agcttgccaactgctactgggttcgccttctttcttatgacgagatgaccaggtatgagctccgtgggtcgaacttttttgttgtaagttgccgaagtgcttgtggcgtacttgtgcatgtgctcgagcgctttgactcttactccttccaagagttcgagcgatacttcgcgtccttcttcgcccccggaaaacatcacccttggtgagttagcccctagctctgctggggtcattgcctcatcgccatacagaagcataaacgggctaaacttggttggtcttgtgggggtcgtccgaagagcccagagaaccgatagcaattcctctggccatttgcctttcgccgcccnctcaagtcttttcttcagtgcttctaggatcttgccatttgtacgttcggccgccccatttgactgcgggtgtatg

SEQ ID NO: 76625 - DNA, 435 bp, Oryza sativa
tgagggtcggcacatcataacggaagtggaagaagattttcatcctagtgccccggccgaagccgccaagaactatgtacgtcacagcggttgggttgtgcgggataacgtgcctgtcagtacggtgtactggcgaagaacaagggcatgcggagatcatgagagctttgtcccagattcggagaaagagatgctgtggaccacaatgctcgagacattcacccttcctgcgggtacagaggacaaagtgaaaaggtggactctgaagaaaatggcagaacagtttcagagcttcaagagagatctgtaccagaagtatatactgaaggggcagacaccgaacttcgacacattcccaaagctaatggatcactgggacgagttcgttggatataagacaggtgaacaatggcaggcgatgatggaaagaaacaa

SEQ ID NO: 76626 - DNA, 428 bp, Oryza sativa
agcttatatagctcactattatacttgctctaagagcaggttcaatagtatcggagcaggttcaatagtatcgccggctgctggctccatccatctttgcagctattactagagccaacttatacaatagagtagctcctgtgttgatcatatatcactaatcaataattaattctgtacatatattaatgtacatgatccaagctgaagtcaattcctgtggccgtgtctgtgctaaattaacgagtcacgacaatcacgggccttagcaactcattgccagcatgtcggccacccgcatcaccatgaaggcatttcaacagaggagaacaagataaagggaaaaagggaagagtcgaatagattagacgatgacaaacttcaaattagttttaaaagagaacaactcatattaaacaaagctgcat

SEQ ID NO: 76627 - DNA, 407 bp, Oryza sativa
tatccacacgaaacacttgaacacactgtccttccatcttattgagagaattgttgctagtggtgatgcaactgtgcaaattcttgtctggagaggtcttggacatgcatagttttctggatcagatggcacaaaatctgaactagatgaagacaggggtgatgtgatgggtaatggtgatgcaaatatctgcactacatggcattggcattcaagcggagtgaggtttctctaaatttctactgatggagcttacttggtctcaagttttgcttgctgatttgtgttcattcaattgtgattctagggttttatgcttttaatgacaagttccttatcttatacgtggtatggatggagttattgttgtatggcaactatattctgggaagagaagatataaacca

SEQ ID NO: 76628 - DNA, 437 bp, Oryza sativa
  unsure (1)..(437): unsure at all n locations
agcttttagcttaacccttctgtgtaaagtattttcttcttatttacctgcacattaactattttactcctactctattcaatttaaattgacatatctcgaaagggctgaatatatgtgtgtagtttttttttaatttttttagagaaaataattttactcagcctctaaatctaatcggatatatgcagcctttntaaattagaaacttagtctcaaacagggaacttcgccatcaaataacccaatctaatattcgctcgtatgaagatttgaactcagaacttgnggtgctattcagatcactgcaaccactagactagtgctttttcatgcgtgcatatcttctttaattccacgnaagttggaaaataaaccaatagcttttctccacatgtatatttgacgtttatgcagcattttgtgctctgatctat

SEQ ID NO: 76629 - DNA, 195 bp, Oryza sativa
  unsure (1)..(195): unsure at all n locations
cagctggaggaggaaganaacatatatatatgggtgggacttttgtcccngttggtgttaccaacggggctgaagatccccgagatctttagtcccgggtngtttgggataacgtgcctttttatttatatgtatttgttcttgtatacagttttgtgttgatcttaataattatccgttccttatgcgtcttac

SEQ ID NO: 76630 - DNA, 441 bp, Oryza sativa
agcttttcgtccattcgtccagccctagttggagtcttggagcagaagtgcagattcgttttctttttactgaaaatacagctttattaatggttggtataacaagtgggccgctaatgggctattgatggttttgttgaaacaacctgttggcccattcgcatcacctctaagggaataaaccgctcaatgtttgttggtccttttgtttttcttttttattaccgagtgtgcgcgttatggacgtttgtactgtatttttttatttaaaaaaagagacaaacgtataaatacatcttgccgatacactcgccaccatgcatgcacatctcatttacacctgtgcaaatacgccttctaacacatataaaaagacaaatacctctttagagcatctccggtaataaccctcattttagagtctctataagtgaaatgggg

SEQ ID NO: 76631 - DNA, 452 bp, Oryza sativa
  unsure (1)..(452): unsure at all n locations
ggattatgtcattatcaacaacaaattctaaaatggtgttaaagattgtgatgntctgaccaaccgaatataagaaagttggaagcatccaagtaacaaaaacaataggcatgaattccacatttgtaggttctattgggatgatgagtgatgactaaccagttgtacacttgtatgtatgtaccaagtcgcagtaacaaatgcagatagagcgggactataagaaccctacatggtacctgtaaaaaaaaaaaagaatgaactgatgttgatgtgctaggaagaaaatggaaagagcagcaactggatagtgaaatatggggaagaagagagagtagtagagagattgaagtgcttgttaccttggtgcaggctangcctctacaattgggatagtttcttgaagcttgcggcactgcctttttagcttctcgttgcacattaacagacgt

SEQ ID NO: 76632 - DNA, 436 bp, Oryza sativa
  unsure (1)..(436): unsure at all n locations
agctttggcttctaaccaaaaccaccatatactctatttatactaccaaaatattggtagggcaccgttttgacactgatccataacggccctatgcgtgtcgctggcaatgcgtccagaggccccgtgcctctccctgccagcctgacgccctgacgtccggcccaccactaactcttgagacagacgacgcctacacatcaccgncttctttctttgtcttcctctatcttctcctctcctttttgtctttcttttttataagtagcatcttcgttcctgttgatgatgcaatcaagctagtatggcgatgttgactgtccagttattaacgtgattgccgcatgaatccgttttactgcaagtggttattttcacattcactcggctctgttctgctgtaattcagtcaatgctctgaactaacagtgcaaag

SEQ ID NO: 76633 - DNA, 436 bp, Oryza sativa
  unsure (1)..(436): unsure at all n locations
agcttctcctccgccttctccaggcgcgccttgtgcgcgttcaccatggcctgcagctggccacacagcctgctcagctcctccatcaccgaccaatccacctctggctctggctcggtctccgccggcggcgccggcgccggcaacgacgacaggaagcggtccatgaccgacgggtcgccgatggagtaagccctgttgccggcggnggagaagacgacagccgccacgtcggcgttgaaatgaacggacagctcgctcgccatcttgaagaggtccgcacggcgcttggagaagcacaccttccgtgcctcctcgctctccatctttcgcctactcgccaccatgatcgatccaacacctctcttcgatctgactactgctacaactagaggctatagatgagtttgggatggaggtgatcgatggacaaaac

SEQ ID NO: 76634 - DNA, 448 bp, Oryza sativa
  unsure (1)..(448): unsure at all n locations
tgtgacgctatcagacaagatgtctctgtcatggacaatgcttacttatatgaatgctggtgtgccacacagacacagtctcaaaaataatgtccaacctatgtgatatccttgagtttatgcaatctanctagaaactgcactgagcatcattaatctggtattggcagattttcagtttagcttatggaagggactttgggggtgctctcatggcagtcggtttagagatttgaaaagatttgtgcttgcctatgtgtgagcaattggctggatttggctgatacctgcgtagtaaagtttggggtgtattggatgtttggcgggctgcgttaaatgctattgggctgtaacccttgcgctatatgtggtgctattgtgtatgattggtgggtctatatgggcgttacccacttggtatttgatactaatgtaaatgatatataat

SEQ ID NO: 76635 - DNA, 396 bp, Oryza sativa
agcttttattgctcgacggctactagaggccattactctctttattccagtactcgccaggatgacttttagtcagctgattaacatcatgccagattccaaacagaatagggattctcagcagtagaacttgcaaatcaagacatagtatccgtatatatagcgcttgaatattggcatccatctgttcttacatctttacacatgaacaagagagagtatcgaatctgtgatttttttgaagctccaaaagctactgaaaacctgacaatatatgctcctcgacgtgtcgtgtgcgcgcgcgcgcgacacgcatggcgatcggcacatgttcatttcctgtacacactatatacaggttacactttacacattagcctcaatcgatcgattcac

SEQ ID NO: 76636 - DNA, 435 bp, Oryza sativa
  unsure (1)..(435): unsure at all n locations
cttaaaactaagcttggctanggatcctagtccatccccctcctcgttttcatttgtctgcttccaaccctaatgcgataccacatgggcccaacaatctaacctcactccagtggagaagtattataatcttcgcattaaaagcatgtnttgtcttttgacttgggaagccaagcgcacgtcttcttgatgatggggcctgtcaaatcttgctgtctgacacaaggggtgcccctgtcagtcaccattcaatgggggaatacttctggggcctattacacccggaataatggtgccttagctttgaccaaagcgggacgaccgacttccgctgggattatatgaatgaaaactctcaccatcattattttatgtgataatgttggcttgacaatacctgaacaacccaatgggcgcctacattcttggtccatc

SEQ ID NO: 76637 - DNA, 332 bp, Oryza sativa
agcttaccagccttcttttatttattggtctttctagggtggagctggctgattcgctggggaactattgaaatctattctgaatcttgactaaaaataccgtacaactacggttaccgaccaaaacggaggaaaaacctccatcccattttcactatcatttccagaagatattactgtttccatttccaccattatcggttaccaataccgactgaaacgatcgatgcaaactggagatggcagctggaaatctctgaaatttccgtaccggattaaccggacatctttttgtagaaagaatttttttccttattttctcaacacttttt

SEQ ID NO: 76638 - DNA, 409 bp, Oryza sativa
ccttagatgttgtcaactttacgctggacgcatcatattttgccaagcagtccgtatatcacttggatcatattattcggggattcacaccgcatatgctatatattgatatcaagtcacttggttgattacaattatcataaccactcggttggttagattatttattccttgactatatgtttggttggttcatataaccacatagtcgggggcttcacctattaagtgcatctattcatgcacctgactttatttttcatccctccacagtcttcagatttggctaaagtactcgggagaccatggcgaagataattgaagcactcggtttggagtatctattttagaaaagatatattttcactgggaaggctcagggctactgggagatatgggtccccatatc

SEQ ID NO: 76639 - DNA, 419 bp, Oryza sativa
agcttgtatagagagatcataggattctcttatataagaagtatatgcagaggaacgaatattgtttcaaggcattgatattcttgctagtccctctttgtgtcaaaagccttctttgccactttcagttgtactactgacactgaaatgatttttctaacgaatatcatgttttagattattagttctttgtgatgattattccgagaagttaactgtaactcatattgaagtttaggaatctataatagagaaaattctgggcatataatgatttgtacttctgcaacttgtaatacattaagttgtatatatcttggattttaaataaacacacatatataatctgaaactgtgttggtcgaactagctgctcttctgtttgagaataactgaaagttggtggcatgtgtgatctg

SEQ ID NO: 76640 - DNA, 459 bp, Oryza sativa
  unsure (1)..(459): unsure at all n locations
ngagggtcggcacatcataacgtaagtggaagaagattgtcgttctattgccccggccgaagccgccaagaactatgtacgtcacagcggttgggttgtgcgggataacgtgcctgtcagtacggtgtactggcgaagaacaagggcacgcagagatcatgagagctttgtcccagattcggagaaagagatgctgtggaccacaatgctcgagacattcacccttcctgcgggtacagaggacaaagtgaaaaggtggactctgaagaaaatggcagaacagtttcagagcttcaagggagatctgtaccagaagtatatactgaaggggcagacaccgaacttcgacacattcccaaagctaagggatcactgggacgagttctgtgcatataatacaggtgaacaagggcaggcgatgatggaaagaaacaaagaaaatgccgtcaagaagaattc

SEQ ID NO: 76641 - DNA, 430 bp, Oryza sativa
  unsure (1)..(430): unsure at all n locations
agcttcctttagtagattgatttccttaacctaatatagcaggaatgcgactattggcgacttgataactctcatcgactgattccgagatgctgcagccgatgatgtctttgccgattaccaaatttcactattaacagaacttcaatgttcgtcccgagcagatgctgcagccgataatgattctaagccaatgacgtctntgtcgattaacaaatttcactgttaacaaacttcaatgttcgtcccgagcgctccgatctctggccggttaacgcttgtcacgcctagatatttagcacaaatttccagactattntgtgtattaaatccctgtacaggaccagccagggtacacaaaacgacaagtaatttacagttccaaatgtaaataaagcgtataatacttatagaagaggcacttagtcct

SEQ ID NO: 76642 - DNA, 348 bp, Oryza sativa
tgacatatcctagctcccagtagtgaagatggtaatattattttcaactacacggcttggttaatacgcgtccattgagcactcttacatgaacagtgtaaagggatagtatgaccgacttcaggacgaatgcaatataagaaaagaggatcatcggacgaatattgcacatataaacacttacagaagttgacgtataagacgtgatgagacgacttccacaccgggtgaagaccaggtgtatagttatactcaacaaatcgcaaaagtagtgggagaatcgctacaccgctggtcaaagacctattgtagtcataactcgaccactagagaattgaggtacgagaa

SEQ ID NO: 76643 - DNA, 303 bp, Oryza sativa
agctagatggcgtagtagtagaaccttgtatatcatgtgcccctacttggcgcgccactgtcgacggaggatacccgtagaccggatatagaggggattggggtacgctggtattaagatctacgtagtacgacatggagcaaatcataaacaagaattatactggttcacgccccctgatatgtaataaccctatatcacgtgatacgggattattaagtggaatacacaaataacaaaggaaaagactgaacctatgggatttggcgagattgtagatgagaaggtttcactaacctcact

SEQ ID NO: 76644 - DNA, 366 bp, Oryza sativa
  unsure (1)..(366): unsure at all n locations
cctataaaactcaacttctgcgcggctgatgatcacatacatgcatgcgagcatttattntgtcgtgctctcgctcggctgacttgtgcggctgcgtatttgcaccaaagttggagcacgggccgttgtttggatatgatgaggcgtgattagcgcgtaccggtgttaagaagataagagatagatagaatttctattctatcagatagatcccttttcggatggaccatggtatcctgatatatacaggtctacggtcgattgaagaaaccccgatcacaatttatcaaactactatttttcttaatcttgacttttccagtgcttttctatttgcggtcatggctgagatctagcaacccttaa

SEQ ID NO: 76645 - DNA, 434 bp, Oryza sativa
  unsure (1)..(434): unsure at all n locations
agcttctgattntccaggtcagggcatgttttttcgcaatgaagcattcggtgcgtaaaaattcttactgcctgtgagaagttactgaattttatggtcgagttcacgcgttgaagcctgtagggacttgccttctttccctttttgtctgattctgcatgtcgtagagtgctgaaatgttgcacaaccacaggctactagcataggacattgatatgtgattacgtttttccgcagtttttccctgagctgattcacggttgctgggatgagtcaaagatgattggctgtggttcccccaactggggttcttcacggccctgcaagtacgtgtcccttctagcacctaagaatatgatctagtaccgaaagttacactaattaacactacgcgttaattacagttcagtattaaaaatattcgccacatatat

SEQ ID NO: 76646 - DNA, 369 bp, Oryza sativa
  unsure (1)..(369): unsure at all n locations
tcctccggcgaatctgagccgctggctcgnctttcctcttctcgtgcaaccacccggtgtgctcgctttcgccggtatcgccgtggttcgctccgccgctcgccgctgtcgaccgccgtccgttccggtcggcgtcgtcgtctacctcccgccggcccgcgtgggcaccacgtaggcgccacgtctgcgccagctcatcctagaccgggtcgagccgaccccggtcagtccctttccgtgcgcgcgctccaccgcgagccgtgaggctgcgcgtgggcccgccgcacccgcgttcaccgcgaaccgcgcgcgtgcaccgcgtncttcccccaccctatcgccgcgtcgcgtgcttccttcgcacggtga

SEQ ID NO: 76647 - DNA, 410 bp, Oryza sativa
  unsure (1)..(410): unsure at all n locations
agcttaacatcttcccatgttatttccactccgttgcctagaatttgcccacaaacttctacctgaaagccaaagttagcgacacaattatgatgctgcaggtcccacaacaatactggtaatacatcgttgtgcaccatacacatatactgaaaaaaaggcatgatcctagacattcttcccaacattataacaacttggttaagtaaaataatgaggaaatagttgctaactgaccttagcataagcttctttgcctactgaactatcaagagatgtccgagcttgaaaaactaaattatatccctcagctgggcccttgaacacattttcaactatgttattaattngaaaagaactgtgtcaaacaaccaacaatctaaaatacttacagtccttgagagcacaat

SEQ ID NO: 76648 - DNA, 459 bp, Oryza sativa
  unsure (1)..(459): unsure at all n locations
ctattacggacactataaaactcagctttgaaatgacctccactgacttccacggntgcagtcttatggcaaaaggggcttgtgcttgttgtaaagcggctcaaagcacggcagaaagcaggagagatacgatcacttatatagattntaagtagaacgggctccacccctgctccagataaggatggatttctgtacattggtgtagcataatggtgtctgtgattaacaaaaacgcaagctttttgggtaggtttgtgcgttccagtggaaaggatgtgcgtgcatggctgctccctgctgccaattagcatcgagacagtgcaaaagattattgcaaattgccgacaggtcatggtgggctctggtcccggctgaactcccccngtgccgtttgtgtcactgctgattcagctacaaaactgagctgtgcatttttaagttaagttaagtattttt

SEQ ID NO: 76649 - DNA, 428 bp, Oryza sativa
  unsure (1)..(428): unsure at all n locations
agcttntatttggcaaatattcatatatcagttattttctcctctccttgatagcaacatcccaagagcttaaccagatttgtgtgctgaagctaggctatgagttggatttcatttctgaactctgggaaaccttgccctgaatgtgaagcaacaagcctcttaactgctatctcggatccatcagaaaactgactctaggaaaaaacatcaaaacagatttatcagtgataaatgattatgtacattcttttaataaaaaagtgggtaaaacctgtactctacatccaaccagatgtacacgccaaaattatttacatttattatgtactggatatcagcattttactcatccttctaagaaaataactctcattgtatgacttgtaagatgattgaaacatattcataacaaccagctaccagat

SEQ ID NO: 76650 - DNA, 431 bp, Oryza sativa
agcttgacccctcatatccaccataatagactcctgttccgctatacaacaatgaacttttctgcttcaagtgaacatccgaaacagatggaaatgctgcaaggttggtaaaggactgaggatgtgcaggcagtagtagtaaacacacaacactggcaaggaaaagatcaatgggcaacctgccatgacagggtcactggtaacagccaccaacgggtcaccgatctctccatcatatcgtgcaggaacccagtgaagaatcaagtagaaaccaacatcatctaacgaaggtttgtacatcctgacagcattccattagatcaaagaggattagttcttaacctaaaccattcaaaagtaacaagcttgatgaaatcagtaggagaacgcacaaatttactccaacttcagaacatgaagccaccagatca

SEQ ID NO: 76651 - DNA, 450 bp, Oryza sativa
  unsure (1)..(450): unsure at all n locations
tgttcgacgttctaatcttggcaactgcatgcatngaagataaacaatatattagtatcataaatatgtgaagctgtctagcatatagtatagagacttacatcctccgcattagtcttgtacctcccgttaactctaatgaattcgcaagcgtaatacccgcaaaggaccgttcctcacggttgcttgtgacacttcaggacatatcataaaaaaatagttaaaatttgcaattagtgaaataattggtatacattaagtgagtggagtattaccggccaatatgtacgtactaacagcttctccctagttcaggtctgttctccatccttgaacttgtaatactggtacgcactgtatggatgtcgtaccgtttcacattaaggaggatatttatttataatacattcatatcaaaatgcaagagtcataatcacttactactgtaag

SEQ ID NO: 76652 - DNA, 404 bp, Oryza sativa
agcttgtttgtccctgcatagcaatctgaatccgttgctttcccaacgcgtcaatctcaagcgaattgccctctgtcttgctgcttgcattagcacacctttggcctaactggactgcactacgtgtacatgctgagcttttaatgatcgtgcatgccaccatgcattcctttgttttctccatgcatatccacgtcatcctgcatgtctcaattcaccaatcctatgctatgcatgtgggcaagcagattgcagcctggtctgcttgtacgcttgggcctgcctcctgagacatctccgatcgctttgcagcttaagccgtcgccgctaagcacttctacattgagctttcaaaattgtattctttacgagatcaatttggcccctgccccacggcaacacta

SEQ ID NO: 76653 - DNA, 453 bp, Oryza sativa
tgtggctcgttagctcgcttgagtcacgaatagcatggctcagctcgtttcatttttttaacgagccgagctagccttttagctcgttagacataacgagccagcttgagctggctcgcaagccttaacgagctatgttaacccaccagcagcaagccaagcccacaaagcccatagctggataagcccattagagcatataaagcccactaaaccaataaacctatcttgagccgccccactgccaccatcgcgcacgggcgcacggccctctccagttgccaatccacctccactccaccggcaccatcacacgtgggcgcgtggccctcgccagtcgccaattcacctccactagtagcgagcgctgcgtgcccgtgctgccgctatcgcctctcgctcgctcatccatgtgcccacgcccccttcgtctcgctcttatcccagtcacag

SEQ ID NO: 76654 - DNA, 441 bp, Oryza sativa
  unsure (1)..(441): unsure at all n locations
agcttccctgctcctctggcaaatatgaggcttgaactgcttctcgttntcgaccaacatcagccagctcaggtactaatctgagccgatcaaagtacatatttgctccactagttattggaacaacattttcccctttcaagccataatatatgcagtaagcttcagctcctgccagcgcaagggcaccaacagggtcaagtatgcttcttttctcctcaaacatatcctgcagccatgaccaaaaaaaaatatagggcagaaccgcagaagcattattagggtaagattggaatatagcagtagtccgatcatagattcctagcaccctataaagaatgtcactggaataggattatacattagttgaaaaccaatgcccacaagcaactcacaagaaactatgctagtgtacaacatttataagacatgtccgctaca

SEQ ID NO: 76655 - DNA, 395 bp, Oryza sativa
  unsure (1)..(395): unsure at all n locations
tgtcngtggttgtccacatggacggtctccttcacgctgttcgacgtccccaactacgctggtcgtcatcctcagcaacgtggccgttggggatgtctgcttgtcccccaaccccatgaagcttcgggagagtccttcgtgagctaagcagcagaaagctcgacacccatctatggatcatttaattnttcctatcttggtcctgttcccactttcaccttttgtgcaatccgtcatcaccgatagctctatgttgctaatctgctgctcagctgctgcattccaatcacagtcgccaacttcttcgtggcaatgtcacaaccctttgtacgtcttgagtaattcgtttagtactaatctcctgctatgttagctccattgataccacttaattt

SEQ ID NO: 76656 - DNA, 278 bp, Oryza sativa
agctttagcattggtgtttagtcttaaaaaatatactcactttttagttaggcagctatgtctgagggctaaaattagagttattcgaaaaaaagaaaaagaacttcgaatttattctaaaaataaaatgtgattgcaattagtgtttgtttacacccaaatttggcacctaggattaaaataggaaatattatccaaaattggaagtctaccggtttcctccgagtgagccggtctgaccgctgtgtgttgggcggtcagaccgccggttgagggcc

SEQ ID NO: 76657 - DNA, 440 bp, Oryza sativa
agcttcatggacttcctctggctatcatttctgaccgtgatcgtattttcacgagtgcactgtggaattgagctcttttgtctggccgacacaacttcagatgagttctacctaccaccctcaaactgatgggcaaacggagcgggtaaatcaatgtttggagacacttttgcgctgcttcgtacatgcttgtcccagccgttggtctcgctggttggcgcttcctgaattttggtacaataccgcctaccattccgccttgggttcttccccattaaggtattatatggtcatcctcctcgtcattttggtgtgttggacggagtgacctgcgcttgtgctgatttgaagaatggcgcaaggaacgtgctatggtgacgaagtttgtgtgtcagcatctcctccatgcccagccacgaatgaaagatcaagttgataaa

SEQ ID NO: 76658 - DNA, 295 bp, Oryza sativa
tgcaactattaaacaggtgtaagcgctagcctggaaattaaggaaggctgcgccgttgacatgcggaccccacatgtcaacctaaaagaccgcggcagaccgagtacacaaaagcggtccacgggtcgacggaagcggatcccgtgtgtcaaccgatgcgagtggccgacaaacgggctccactatacaccacacggtcaccacccgcacgcgtgaacgactaccgacaccggtacactggtaccggtgtcgacgaccgcacaacgggtacggtgcgacaccggaatgaccaagg

SEQ ID NO: 76659 - DNA, 434 bp, Oryza sativa
agcttgtatgacttatgcacagattatttttctatgttggtattgcatatttgtgtcaaccaaaatgcaccaaacaatgatttgctgcgaataaattccaaatataagtcaaatgcagaaccaaaaaaactagtatatacaaattacatttggaaacatacagtcagaaaactttcgactatatatagtccaattgtcttggcagctatggcaccaaataaatgtttgtagcgaataaaatgctaaatagaagtcttaacaatgccatggcaagtgcttgcatgtagaggtgactgagggtaaagcatccacttgtgttttaaaaaatgcatgctttctatgcattggagattatatacagtgtcatatctgtaggagctaacccgaatggaggcattggtaaaaggtctgcctacaaatgccagcaaatgtca

SEQ ID NO: 76660 - DNA, 461 bp, Oryza sativa
tatatatgaatggtgctctacaaaatatatttattcattttaataaatagttaatatttaattaatcacacgctaatggaccgttcgggtttccgtgggagtcgcacagtaccatcatgcgagcacagtgctcttcagcgcatgatctctgcgagtttccgtggcgcacaactgcgaaacagcacaagaccaccacttccttgtctcgttcaccgttacaaggttgcaggcttgcatcttccgtagagacctgaaggacagtgctacaaatcgagcggtccgctgctgtgtgtatggcacgcatcaagaatagtgatgcacgttgtcaacaagcagctctatgcagctgtactttgtcatcctagtaccactattgatgttcgagagcacttacaggtcacgggtatttgatccttcatcgctgctctagtacatctacatgacttgatgcatatgctcat

SEQ ID NO: 76661 - DNA, 435 bp, Oryza sativa
  unsure (1)..(435): unsure at all n locations
agcttatgtcgaacaagaacatttctgaagattaattgatcaagcctctacaaattaactagtaccatgcttacaactgaatgacaaaaggacaggagccatgcaagttgctttgacacctttattccaaaatgctcactttactgatctttgccctgaaaaatatgctcactttaccgtgaaaaccattcttttcttgcattgngatttgggaggtcaggattatccgtccctattctctgggcatgagggagcatggaatcccactttgcattgtctcaaactttagcatctccctttcggctcttccctgtcagtaaagtaggatctacaaatattttagcaatagctgattagagaacaatttctctgaatctgaggttgtgtggatcaaatcttcaaaatactgaaaacatgttactttgtggacaatat

SEQ ID NO: 76662 - DNA, 425 bp, Oryza sativa
  unsure (1)..(425): unsure at all n locations
tcatcaccttccttgctcacacgttcttgctgttgccttttattgtggcatatctcccaatgtgtacgtctcaaattatttcaagaaagaagcaatctttcatacatggagtgaggagatatatgggttcgggatctcaagatcttacacaacgctgagtgcccaagttttttatattccagatccatctaaattaaaggtgaaaaagggtcgacgccaaactagacgcatcagatatgatatggatgagtcagaagcaagtgggaggactttactctgcagcaagagtgatctgtgcggccatacttacaagaaatgcccggatgagagttntgtactaaacattcattcttaactgtaggcggaccttctgcaccctgacgctgatgattactctgtccgacgctcccttgaagcgtccctgt

SEQ ID NO: 76663 - DNA, 423 bp, Oryza sativa
agcttgacgaagatgttacgtaatataatatctgaacttataaacaaacaggtaaaagttactgtactagtacatcacaagccaacaactaaacaggataagagcacgcaaaaaatgcaatagctccactagaaaaattcatcgcggactttccagctatgcacaacctaagcaattaccatatcaaaattatctatagccctattaagtagtaactcccaatggaatctgcataagccgcaggttagcattcatagagaagcctttgcctatccatctactacctcatcatccgattaatcagtggaacacatgtgttggtcggggaattgaatattgatgaaccaaaccatctcagctggttcgatcaaaacctcacattaagaaatcacatttgtacggtcgcatcaccaactacctaca

SEQ ID NO: 76664 - DNA, 427 bp, Oryza sativa
  unsure (1)..(427): unsure at all n locations
agcttcatagagtggatttgtccaaaanaaatgttataaaaagaaatgaaaattaaacaaagtttatctaattttaaatttcttttcgttgggtttataacccattctaaatagaaatattcaaacattttaccaagactaatcaaatgaatatatttaaaatttcaaacagaatttaacaaaaaaaagggcattcatatgaaacacatcaattgtttcgatacaaaaattttctcatgaattaaaagaacacggttttgaagtatttttagttcacaatttatatgttgcaagtaacgaacgttcaaagaaccaggggcggatccacagtatatggagtggggtcccactcaaatttaatatttagtgtattactaatgtgtaattaagtaaaaaaatttaagcacactatcaattctaataagat

SEQ ID NO: 76665 - DNA, 448 bp, Oryza sativa
  unsure (1)..(448): unsure at all n locations
ctaactgctcctttaaggttaaggtacatgtggatttatatggttgcccttataaaagggacatttacatatgtatgcagtgtcatttgcacatatgggcctttaatgggctgataggctgggcctggtctatggcaaacgggcctaaaaggctggggaggcctgttgggcctccttgatgccaaactcgtcatagcgaagtccccgagatgccttcacccgagatgcctttactttcggagtaccgacgcggctttccagccttcaccatcttcgcttatggctttcaccatatggcttcgcctgaatggtcttgacgtctttggcttgaatccttactggtactatggtttcngcaggtccggccgaagggcttcatggcatgccttcaacaagcccctcacgggcaagggtgagtaaagagcttctgtcgagaacgtgcaaacta

SEQ ID NO: 76666 - DNA, 203 bp, Oryza sativa
accgaaccacaaacaacggaagacctccaaagtacacccccagacagccagcaagaagaaagaacacggaaacgcccaaaaagcccccaaaaacaggaaaaaagagaaaccagcagccagaacacaacgggcaaaacccaaagcgaaaaacacaccacccaaatggaaaaacccaacgacggcgcagaaaaccccgaggaaaa

SEQ ID NO: 76667 - DNA, 427 bp, Oryza sativa
  unsure (1)..(427): unsure at all n locations
agcttgagcataatatatagtgaatgattaaaaatgaaatatgagagttagctgccaacaacaaacgacatctgtacgttaaagcacttttaatacatacgctatagatagagtattatcacacgccaatataaattggctgcaggtaaaataatggtatgcaacaaatcaaaatttaaaaaaagcaaatattggacctgtcattgcagaatttttgcggtgtatggcttagtacattacccattgaaattaatcagaatgcatggtgattgtgcactatcatattatcgtagctcaataactncaagtctatttaatttgaataaaggcaaagtattagtgaactctaaaataaagtccacactctattggatgcaataaagatttgatgtttcttttagcatgaaaatatcacaagtacaattaa

SEQ ID NO: 76668 - DNA, 433 bp, Oryza sativa
  unsure (1)..(433): unsure at all n locations
agcttgcgcctccaccctcccccanaagctccccacagccagaacggaatctagccataggatgggaggagctccaccgaaaggatattggtcggccggcaaccgagaagaaagcgtcaccgccaccagccgcttactcgctcacgttgccagctgttgaaggttgcatgccactgtgtgctgctacttctcctcgatcaagcaccgcagcgggcactcctcctcgcgcctcgactgaccgtcgtcgacagagcatgccgaaaccaaccaaggtggggagccctaatgggcgatcaatcgtgctccctgcgccccgcgcgatcagttctaacccatctagtctctcctctctactactagtgcggcggacagcactcgcttggagcgcccgcgtattctgtttttttttcggttctcttgagcgccccgtttc

SEQ ID NO: 76669 - DNA, 361 bp, Oryza sativa
ctaagcttacctggtgtggatgtgaggtggcctgccccctgcctgttgtggtgtctcactcctgaggatgctacgctttcccccgtagcgggggcgcgacacttactacgccggcgctcgaaagaacctcatagatcacgaacgcgccccctacctggcgcggtagatgtcggagaatgaacttctccaccaaggaaccgggaggcccccctttgtgaattcggccgggggcagcgggtgagattccatggcttgatgagcggagctgtgtgatcttgagggtgttaagcccctcccagacgatgagacaaaagagatttatacaggttcaggccgcgatgaaacgtattaccctacttct

SEQ ID NO: 76670 - DNA, 412 bp, Oryza sativa
agctttgagcctccagctagcacctccatcaccaaccacttaggaagcaagcaactggttgcctgcatttgaagggctagattcatcacggtacccactgccattatccctcaggtatggattcaattcctttggataggctttcttcaccttgtcagtacccaaaaagttgatgtaagcaaagcaggagagatatcccagtatagaattttaaatcactaaacaaaacatttattccatacatcttatacagatccgtagatataaatatagggtgtgttcgttacagccggctcctaacgagcacagtacgcacggaaaacggagcacccattataacgtgataattaagatttgctaatttttttcaaaaggatcatatgatttttagcactttgtattaaactttttg

SEQ ID NO: 76671 - DNA, 340 bp, Oryza sativa
  unsure (1)..(340): unsure at all n locations
tgacccatntggtactccatttcatgatattcttgagatgcagtttcatattttctctatactacacagattgagcagtgtggacgcttcaagtactatcgcaccatctaaagcaaacggttcttgcgattcaggtagtcaaactcaactggttattgaatcaacgaaaaccttttgtgactgcaaaaacaaatttatgcataaatatggaaaacttgtggtctggggccctaatgcatcatcatccatgacacttgaattagaagctctatcttggatagatacgtttggaaacccggctctttgcatggaaagggatgtggataaacgcaatatctca

SEQ ID NO: 76672 - DNA, 432 bp, Oryza sativa
  unsure (1)..(432): unsure at all n locations
agctttgtgatgcanaacttactcttgatgcctaatacacacaattgagcaaactgcaacaggatgttgaggcttttattgctgcatgcagttgagctagaggagacattatggttgtggaagatgcagagaacataatacaggcgatcaaatctgttagagcacaagatattgaattcagatatgagccaccggcacaatcagaagacatattttccatttttgaagagctgcgttcaagtgaagagcctgtcataaaggagattgagccatgctacaagaacaactctgctatgtgcgaatcatatatccaagaggctagcccaatgactgatatattcctggaaaagccaaccaaggtgtactcaagttaaagccctcataatgagagtgacactgaagatggcagcagctgggagacaataagccatg

SEQ ID NO: 76673 - DNA, 465 bp, Oryza sativa
tcacgcagtacgtgttggcgcctttctggccatttggactatcatgccatcaacacagacactgaaagaacgattactaccttgctagtgacatgcatggcacgccaccttaattatatttctttccatggagctcggaccaactgcttgatgaaaccaaacacgagagctaatatgagtttcttatcattgctagaagtcgaaatcatatcacgaggtccccaaacagtaggccattaatcttatctagtactagtagctactccctccgtcccataatattacaacctcgaatcggatgtgatgttttatattacaatgaatctggacatttatctgtctagattcgctgtacgatgaaatgtcccatccacgttaaggtgtttattattattggacagatagagtaggtggcactttatatgattaataataataattaggtcagctctgaatgattatcac

SEQ ID NO: 76674 - DNA, 445 bp, Oryza sativa
  unsure (1)..(445): unsure at all n locations
ttgagaacaaacacatgaatntttcctccagcctaaatttcactattattagcatcgggattgttgcacacgaagtttgtgaatatttgaattacaacaaaagttcttgattttttgcattctagctatgttttcataagttatagcctccagataaaacacgtgagtgttaacctttgaaaaaacgcaaaaaaaatttactccagcccaaaaattcacaagtatttgcattaggatcattgcacatgaagtttatgcacattaacattatgataaaaattttcatgattatttgtctttacggtacaatttcgtgagttgtagccttcggctaaaacaagtgttaacctttgaaaaacaatacatgattgttttactccggcccaagaatactctagtatttgaaacggaatcgttttgcgcaagtatgtgcacattaacttta

SEQ ID NO: 76675 - DNA, 423 bp, Oryza sativa
agcttgaagttaaacatcgctggtttgattctttaacactagaaacatgatatgtgaatatagaatctgatagatggatatatacacccccaataatacaggcccagacatggaatcatattctctgtttgtgttatatacacccccaataatacatatctagtcagattttaaaataatacagagccatccagtcaaggtcccctctcatattccacaatatgtgctagtattattatttaattttgtgcctttgtacaattctctatatatacctgatgcatcaataaccaaccttgagttgccttgtcagtccacgtgctgcacattcttaatgaatttgtttctgcgtgctatccagaaaataaatccaaacaaggtgtaattcttggttcacagataactctataaagaacatactca

SEQ ID NO: 76676 - DNA, 262 bp, Oryza sativa
taagcttagtgaacctggataggatcctgttgctctatagtggctggggggataatgaagaaaagaacattagccgtgactatttaatcgtgagctacacacgcgctcaaaagactggccccaccgtagcggagaggtatcctaatgatgcaccataacggaaaacgatggccgaataatttggaaagtgacaattggcaaacgacacttcgagaagatgagctcaccgactgttccggtccgcattgtgctcccatatatt

SEQ ID NO: 76677 - DNA, 431 bp, Oryza sativa
agcttagctaggatcatctacctggacgaattgtcgtgtaagaagaggcggatgatggaggcgcccatccggcgctcggctttgatggcactgagcatggtgccgcgcacgatggcctcgagtgttgggcacgacttgcagtagtacgacggtgtcatgggcagcggcagcgcgtcttcgccggcggcggcggatgaaatcatcgtcatgactagcgcaaggagatggctaatactagtcgtattacacgaagctgcagccatggcgatcacaaattcacaatcaaactgatcactgtatacctctccgatcacagctagctagcttatcttcttcttgcttatgacgacgactggtacgagctgagggattcgtggtacgtgcttcacttattatagagtggactagtggagtacgtgtgccttgagata

SEQ ID NO: 76678 - DNA, 436 bp, Oryza sativa
  unsure (1)..(436): unsure at all n locations
ntaccataactgacaagacatgtcactaactaatatagttgttactctctcataccgactcagaatcatgaaataaatatatccacggacatcttcagaaaaagttacatacgattcttattggctttgccgggttcgactatattaaaaccttcacattctgcttgcaagattgtgtttttgatgaaagaagattttctgtagacatttggaaaattgcacatgctacatatttccgccggttgattttatattttatggatgggtcttgcgaagtcctaaatatgaaaaaaatttcagaaaactatataaaatgaaaaatgtggagatctctctcctttccctttacatgggagtgaggataaggagagaaataattttccggggacatattttggctatttaaggtaatttatttataaatgggtcttggctg

SEQ ID NO: 76679 - DNA, 429 bp, Oryza sativa
agcttgcatatcatgatagtatgaagtaacatttcttgtatcttgctataaacattgcagtttgttgaacaaaatgtcagcataatacatgggaacataaacatctctgaaatatcgtttcaggtatttccaagattgtggtattttgttatgcctacaaagatgtttccaatcattagaagcatggttaattaatacactagaggcacacataacctcttgtttctcaaacaagacatgcttttgagattcactatcaaccgctagctcccaattaatgtatgcacgaggatcatatgtttcctcgaaataaagcaatgcagatttgatcttacctagaacatcatcacttacctcataatggtcatgtcgatccctctccatgtctcgacgaagatgttgatgttgagcacagctatcccaattatc

SEQ ID NO: 76680 - DNA, 328 bp, Oryza sativa
tgatccttaccccctgcctcgcatagatcagatcgtcgactccactgcggagtgcgacctcttgtgttttctagatgcatactctggttaccatcagattcgcatggcttgggaggatgaggaaaaaactgcgttcattacccccgtaggaacctattgttatacatcaatgcccttcgggttaaagaatgcaggtgctacttttcaacgtactactcgaatttctttgggtagcccacaatgacgtaatgttgaggcttatgtcgatgacttggttgtaaaaacgcgccaccaagaaactttactctcagatctagcggaaactttt

SEQ ID NO: 76681 - DNA, 422 bp, Oryza sativa
  unsure (1)..(422): unsure at all n locations
agcttaagtgcatgatactcttcagtcttgttttgtgtgcaaaagagcaagaagcgcgaataaaccggcacatttcgctataccctctttgatgcatccagagtgttgttttcagctgttcagatgtccatgacaactgataagctatcatagtacccttaaaccagccattaatttgattcatggagaataacatgttactacagtgcaaggctttttcaagttactggcacatactccaaggcttaggatcatcaaaacatagaacatgacacaggacactgattgagtaataacctgacaataatatgctactacagaagttnttggacaaggcagcttcagcagcagcaactcaagctcaagatcactgaactgattaccgcagctttctgagcactacttctatcctcctctcactc

SEQ ID NO: 76682 - DNA, 458 bp, Oryza sativa
  unsure (1)..(458): unsure at all n locations
ctcagctgaatatatggagaaatagaattaattaatccacagtttattagttngggtacgtgattgataagagtacagatatatatcacatcaccaggagaaaaaccgaagaatgcattcatgctacacgtttgtactcatggtcgattggtcctcagctgctgctgcttacaagttggtcagtatgctctctccgtgctagtaaaaaaagtcgtttatgacaatatttaagtcaaaccttgaaaatataaattataaataattttgaagttattgagtttaaaaatataaaaattatatgaatagatttgtcttaaaaaatactttcataaaagtatacatatatcactctttaataaatattttttatagaataaagttgtattttggagaccgtgtcgctgtccaaaacgactttctttacaagtacagagagagtatactttntttcttctctt

SEQ ID NO: 76683 - DNA, 383 bp, Oryza sativa
  unsure (1)..(383): unsure at all n locations
nagcttctcgttcttgcattaccaggaaccctgtttggctccaaccgaccccgccccgttgttcccaactattggcttgcgaggtttccctgaaccgactaattacttatccagggtgtcccattccaccttgtgtgtgcactttgattatgttctatgagtttcccacaggaatcaatccttatatgcgaatactggacagtgccacataagctcaacccccgcattgtgagatttcacaattcattgtattttcaaacacaccgacaccacattgtcgggttttgaaggcttcacatacccatttcccatatcttcgacaaacaacggtgtatgtggatatttgtatacgcgcttaaaagcacaatactgagataccacaa

SEQ ID NO: 76684 - DNA, 358 bp, Oryza sativa
attcggaccttaaatctcacttcagtgattgagataaaggggcgggattaatttttttagctcaggataaggagtacccccatttagaatggcttaccaggactatttgaaaggtgtgggaagccctgatgtgacattagctcaactggacttataaattgaagttaacttgaatggccctatgtaccctgttggggggggaacctgcttaccttaacataagtgcacccccttatctttgtccgtgttcctaattatatcaaaaccccatttccccttaatttgtatacctaaaaaccctaaaaaacatttgtggaaccgcaaatttcaacttctgacaacaaatggggatgttttt

SEQ ID NO: 76685 - DNA, 431 bp, Oryza sativa
  unsure (1)..(431): unsure at all n locations
agcttcttgagctngtggggcttgaaatggacctccctgtcatcagtaagtcatgaatcttatcccttctcagagctatccaataatccagttcaactggtcttgatagtaatagccactgtgagtgaagatttttcttgtatctgcagagcatcaattcaatttcagtttattcagcaaatcctgagcactgtactgtacttatttccttctatgacgggtagggggaaatgttgatgttaaccaattagtaatttccttgcagtgttatctgtgaatggagagaccaaaactgtattgaaggggataacccatggtgcctgcgactatctcctaaaacctgttcgaatcgaagagctcaggaatatctggcagcatgttatcaggaggaaattcagtactcgcgaccgtgctaatctcgatttctatga

SEQ ID NO: 76686 - DNA, 392 bp, Oryza sativa
  unsure (1)..(392): unsure at all n locations
actaagcttctattcatntctgaaggtggcccgaccaccaactctcttctaagagactgttcctcaaccaagaaaacatacactgtggcaagtagcatcatatttcactggtgggcaagcaagcattaaaaggtaaaatattagcttgtagtccattatatatagagccatgtgcccatgtgtcatacattaagaatggttgcatgaaagatgtgagctatgaacctaccgaggtactttttgctgaacatgttttagttttgcatacaagaatattcttgtgatatttatttagagttacctttgctacgttgtacacttatattattattagtttttgntgggatgaccgaaagaggtcctcttatgttattaatatatgaaacacttat

SEQ ID NO: 76687 - DNA, 420 bp, Oryza sativa
  unsure (1)..(420): unsure at all n locations
ttagagtcacctgctgcatgcaagctngcattaaccacctaagttcccctagcttgctgagttcgtatgtactcacccttgctctctatataaatatagttctgccagctctgaagatgaagctgaagtgaagtgaatattatgatttcgtcctagctccctgccgttgcctgtggcgttgggtgttagtccgttggctgtgtccgctgctgctgttgttggagtttgcctcgtccgtgtcgactggtgcattctcgagctgatcgagctggaatcttagttaaggtaaataagctctctattaattattaagatttgtaatgattcatgttcgtcaccgtgggtaccaccgctatgtcctggactggtgctgagatcgctgtttcctatgacacgtgttattgccgtttcctactacac

SEQ ID NO: 76688 - DNA, 437 bp, Oryza sativa
agcttcaatgtcaggctgtcagtccactctcttatacttctatatacaacctagtaccgatgtgttttattctaaaatatgttttgtattgggagggagggagtaatcgctgaaggtgttgccgttacaaaacctgagcttacgaaaaatgctcatcattcaacatttcaagaacttgatggttacggtgttcatttgtgaataatcttcattgcacaaggtcgaatctatcacccatcggtgagcgggttggcaactgggaacagctccgccgaggcggcgaggcgtccacacctccgacggcgaggacaagcatttccgatcacctctgctgttggcgggcggcgtcggccgacgcggtgattcggaatactcggcggcgtctgtatactgcctcagagtgccgaaatgctcttctcgtaaacccttgctgatga

SEQ ID NO: 76689 - DNA, 241 bp, Oryza sativa
tctcaatttgcttttgcaaagcactcaaagaaatagagttttatctcaagcttcaatatcaatatctttgcatcttacacatggtttattgcttgggacaactttggaacaagatggctcgctagggagagagactattctttataggttcgaacttctcttcaagagagagtatttggcttttccttgtcttctcacgcttttcatccagactggttatccattggatctcccttggacc

SEQ ID NO: 76690 - DNA, 329 bp, Oryza sativa
  unsure (1)..(329): unsure at all n locations
ctaagcttnctgaccagatggaatgcacgagcatgcatcggtcgggtgaggtttggattcatctagcgcncgngctacaggagattaattggccaatcaatatatgcgagctgcatatattcacggatatatactgacatacacacacacgaatttctatacccatatttgtttgtgtggaactaaacaggataatctgctcattgatgtattctgcatgtacccacaccaattgcctctgtcaacaatgatgggcgttctcatcttcaccgaactggcatcctttttgcagccgactggagtttacgcctacacggttgattggtcac

SEQ ID NO: 76691 - DNA, 431 bp, Oryza sativa
agcttatttcaaaaataagtttggattaataatgcctaattactctatgttatccaattgtttataacaaaacaaaattcatatcttatataataatttcatattaaataaagaagataagtttgcattatcttggattgcttgggaggagaaaacataatattatgtacagaatggataacaatgtcacgcctacttataatctaaaagaaggtgactagatgagtagcttcttgatccaacggctgataactatgtactaatgcgatccaacggcttagaattattgatgatgtggcttcttgcatgccatgacgtggtttcttgcatgacttgctttatataggaagatatgattgtttaagaagtgagtgatgatattctaattagaatgtgtttgcactacaacaaatatacattgttgagacatt

SEQ ID NO: 76692 - DNA, 432 bp, Oryza sativa
tcttttgcaccggaagtgcgggtgtatgctttcatacaattgagtgtatatcagacgggactatgttgcgaaaaataataacaaagacacgagggtagcatgcatgcatccacggtgtgtactatattaagatgaattgtgcgcataattaagcacgtacgcgtacgttcacacataataagcattggtgcgaaatttcaaatttatgcttgcttcgaaaattaagattgattgaaatttggaagtttcgcaccaatgcttgctttcatttggaagtttcgcaccaatgcttgctttcatagttcacgctaaaattggaagtttgattgaaattggaacgatgcgatgaaaaagttaaaaggttatgtatgtaggaaagttttgatgttgatataaaagttggaagttgaagaaaaaatgagaactaactcg

SEQ ID NO: 76693 - DNA, 429 bp, Oryza sativa
agcttcttgaatgaagattatgcctctggctcattctccaatattttcagggatcatgagagcaacaaaccccaggatcagtttgagagaaacagagagctcgtggatttgagtaaggaagtgccttcccaattcgcaagacccgcattccagagggatgcttccctggatcatagcttggtcagtcctacacagagatcaaactcgcatggtggtttggcagagcgcatggctgcgagggctggtttcagtgtcccgaaaatcgatacatcccgtggtggttcattcacagtaattcgatcgcccgtggcaattccaccaggtcttagtccaacaacacttctcgagtcaccgtgtttcctttacaacgcaatggtatgtcatgttccacaatttgtttgttatgcattatgcccgataggatgtctc

SEQ ID NO: 76694 - DNA, 453 bp, Oryza sativa
  unsure (1)..(453): unsure at all n locations
tgcatgaagcccatgctgntcgctcttcttcaaccaaattttgtgcataagagtacgcaaaccaaatgtgaaatcgtttttccgaattcgtaatcccgttgcaaaaacgtattcctgggagaaacgtgcttctatgccttgtgggtcatactgggccttcctcttcctcgttggtagatatttctaatattcttatccatctcacacatattccaatataaaaaaatatattcctattttatcgaatcacaatacaactatgtcttactttggtatctatttccaatacaattaatatattactttcacaaattttgatgtaataattactttaaaaataaaattatttcagaacagatgtgaagaattaaaaatgaatttattattggacgaaggtagtatacacttcttgtctttccctactaaataattaaaaaataagatctcttccct

SEQ ID NO: 76695 - DNA, 424 bp, Oryza sativa
agcttcatcaccttccttgctcactcgttcttgctgctgccggtgattgtggcatatctcccaatgtgtacgtctcaaattatttcaggaaagaagcaatctttcatacatagagtgaggagatatatgggttcgggatctcaggatcttacacaacgctgagtgcccaagttttttacattccagatccatctaagttaagggtgaaaaagggtcgacaccaaactagacgcatcataaatgatttggatgagtcagaagcaggtgggaggactttacgctgcagcaagtgtgatctgcgcggccatacttacaagaaatgcccgaagaatgcagaagttccaagcggcgcagatgctattccatctggacaggcaagtgatggtaggcgaccacctggtgaaggaacaacatgcaggcgcgc

SEQ ID NO: 76696 - DNA, 287 bp, Oryza sativa
tgtacattgggcacatgagtgacagctcaagatatttgttgtacacgtcataaggatggcacacatcgctgatgcatgacagagcttctgtagtctgatgcagatatgtagattaatatataccatccaaagttttaataaatatatattattgccatcacaattaatggattaactggtacatgtataattttatcatgagtccctcgatgccattcatcttatagagagatgtgtcgaaaattatccttgagaaaacaatgaagcaaatttggcatcttgagtgg

SEQ ID NO: 76697 - DNA, 419 bp, Oryza sativa
  unsure (1)..(419): unsure at all n locations
agcnttggagaagaagtcttaggtggagtcctgtcttattccccagttgagcgcctgtgaagatggagccgtatgcccgctagtccgctgctgtttatttttgtttgtcaggcctgaagtgcctttgtaataatgcaaatattatcgatataataaagatgtgtcttttatatcatgtatgtgtggtgtaccccggcttttcctgagacggtgattaatacactggcgttcgggaaaaggcaatttttccggtcgtgacaagctggtatcatagccatctcgactgtaggataagccaagtggataaaacctaacgacatattgtataaataaaactatttgcgaaagttcctctctttcttcttaccctaatgctatctgcaaaaggtttactcttatcttccttcttaaatttcaac

SEQ ID NO: 76698 - DNA, 424 bp, Oryza sativa
agctttccaatttccacatgtcacctttactggcatctgattcttgtataaatttacatagtagtaagtgatacttttatattccctcaactttctatagcaattcacattgtgtatgctatttttgaaacagtatgagtgtttggcggagggttgtggggtgaagttgaagagctacaaaagtcggcagcagcatcttcttgataagcaccagtttcccaagtcatttgaattcttcaaaaaagcacgcccttcgcaacgccagcggaacaagaaccagaagcaacggctaacagttcacaagggagacgagacatgcgaaacactaatggatgttgatgggaagaagagctcaaggtacatgaattccagatatcgggcaaagcaacatgatggaaaagagtcaaaagaaaatgagcatagt

SEQ ID NO: 76699 - DNA, 377 bp, Oryza sativa
tggcgactgctcgagtgcccacagagcctatgtgcgagtgttgttataagcaaagtattggactgctgtacctatttggaaacgtgtgaacatggcctaaagctgctgaaacttgtgtgggggattggtaatgggaaatcatggctcatttggagagatcccttgggtaacaaaggagttctcatggccaccaatcacagtcaaaggtaattgtagacttacgtgggtttcacagtttataacaaagaatggttcatatgatgctaattaaatatcccagcatttttggggtgtatattgatgcagaacacattctgtagatccgactcccctacataagaaaggaagatatcatcgcctggaatcctgatgaatat

SEQ ID NO: 76700 - DNA, 429 bp, Oryza sativa
agcttgtacaaatgcattaattcaactgaaatttggtcatggttagcaccttacgagtaccaacaaccaagccattatatacagcagtgtctgccaatcaaacagagaatcaggttttgtttatccatttatttgctttgtttcctttggcagggcaaagcaaagacagtaccataccagtacaaccaaagtgtatgtcggccacagtaatgcttctttaatctttggactttggagagcacatgcaatgcgatattgcaattcaaacagcaaagcggctggctccatccatatatacattttttaaaaaaaaggacccatctgtatatataaaaaactgcattttcaaagaagatgatatatgcattgtgggatcccaacacacaacagagacatccacagaatgttttgtgaattttatactcttgt

SEQ ID NO: 76701 - DNA, 419 bp, Oryza sativa
ggacacttaaatctaacttaaactgggcgtctacagagtgttctatgtattatgagagacgggaggggaaagaaggaataagagtagagggagccaaaagatgaagaaaaagatgagcacttctagttggatgctacgttcctccctgtttataagcatgtagttttaggtgatttcaaaattaaaaatttttatatgaatgaaatgtagcaaataattaataatgtctatgtttccaaacttctgatgttggttagttcaatgtcaaatagagaaaaaacagagggagaaataatgttgaaacaaatgaatctatatataatgacggaacgtattctaagcggttgtagaccgagctgatttttgcagtgtgtaccttttactcttttcactatacgcaccttgtgcctcgcagcagt

SEQ ID NO: 76702 - DNA, 432 bp, Oryza sativa
  unsure (1)..(432): unsure at all n locations
agctttntcaattcaatgacactctttgtttttgcagaaagatcctccgatgaactaacattttcctgaagaaaacagaaggaattgaagttntcaactaagacttacagtgtgttgaatatggtagcataacacatgcacatgtgcaccaaatcgagatgtccattgtattaaaaaaatcacaacacatgaggaaaagactgtactttggaaacaatcttgtatacatgaaacataaacaataatttatagacgtgtgacatttcaaaagtgtgctnttcaatttccaggatttcaaagtgagaaaagtagggagtgacctttagcttctcataggatgctgaaattctcctgtgtgccttctgtaactctaatgccttccttttgttttcttcatatcttctcttctgatgatccaaaatccatttatca

SEQ ID NO: 76703 - DNA, 391 bp, Oryza sativa
tatataactctaattttttttgacgactcgcacaagactatgcgaagttctattgataaaacaggagaaaaattacaagattataactctggaatgtcataatcaggaaaaataaaagaaaacgtataccacataactgctaaaatttagtaagatagtaatgattgaaatgtgtttagtatattgccttatccagatttggttaaattaaaaatgacaacgaactgaacatggatgaaaaatcagcacacctgaaaaagtggtggatccacagaaagctccccaaaaatcttactcatgcagaccggcatgaacaagatagagagcacctcgcgttgcgcgaaaattttttaattataaattttttattaaagttttacaaaaataattt

SEQ ID NO: 76704 - DNA, 439 bp, Oryza sativa
agcttaaaaccatgaatcccttttatgcatatttggatctggatcctgcagaacaaacatataggatgagtagtatcttatgtaaatataatactcgaggagaattcaagtatttttaaaatgtttataaatatgtatttctcctcttgtcaattttgatttccccgagcgaatgactccttacgtttaaacactctgcccgactagtcatagcgaatgactcccaaacatgcatacgagtgacatgagttcgtcattaatggaacaaagattcacggatcagagtttactactcgggtacttttgcaattgttaagagtagaaaataaattatcttatctctatacttttgatttattccgagtaatacttagcactttgtgttactcggtccatccaacgagccctcgggtgctaggaatcggcccaaaggcaacta

SEQ ID NO: 76705 - DNA, 315 bp, Oryza sativa
caacaaaagacatgttttaatccttaccattcattctctctcttccgttaatcctatctctgtactcatttctttattccaaatctacttgttcttgtcccattggctatacagacctctaatgaggaaccgatctatgtattcaggcattcagtgttaaaaagaccaataccaaatgtgtgtgacgacgtttcgatcgacacatggacccctcctgcgttgataagaccggatagagcctcatgggcatgtgggctgaccggtccatcaatatccgaactgtcataccgactcatgcgtcctgtcgtgaggcta

SEQ ID NO: 76706 - DNA, 435 bp, Oryza sativa
  unsure (1)..(435): unsure at all n locations
agcttacctcgcagccgaccttgaagaagactctgagggtgtggcaggatgatggcaatgacgaggtccacgaacgtcgccgtcctgtcggccatcgccggcggtctgtccgccatcgtcggtcgatcgaccacaaacaccggctaatgcgactcaaaggctggtgagaggatgggaggagactatacgacgcggtgtcagcgggagcaattcaccaatgttagggggacacaaaagcctaatccaatcgcccaaagagcatgtcaatntttaacctcttactatttaactagaattgtggcccgcgcatattgcgcagctagctaccaatattccttattttctattccaaagtttctttcttctttctacatcgagttttatatagagtgtaaacccttatttcagtatttgtttatttgttatttttataaa

SEQ ID NO: 76707 - DNA, 419 bp, Oryza sativa
  unsure (1)..(419): unsure at all n locations
tcagctcaggagatgggacaacagccccatctgttccctatgctgtatcgagccagagacagcccgacatctcatcatggagtgctcattcgcgaaacaagtttggagcacaatttggtccaaactatgactccaaatgcacgctacaaatctcttcaatggagacatattggcatggtgggaaacttgcatgaaatcaatggtcaaggagcaaagacgaaatttggatggcctaatgtatatggcttgggggatctggttacagaggaacaacaggattntcaatggcgtgtatagcacggttccgcaagtggttgactccatcattggaatgtgcaaagccttccatgaagctcaagttacgcagatgattatgccgtcgatttgatgcttgttgcttacattttcttaaatctcct

SEQ ID NO: 76708 - DNA, 418 bp, Oryza sativa
tagctgacattacagaccactgggtctagtatcttggggtaccgccccgggtggaccactcggtcatgatgatccgagcggtcaaacttgattgctatctctgaccatcgaagatactggtgcgggtcgggctgaacatcattgatcttccgttcagtcaacttctgtttccgtttatactcataagccatggggcctgcgaagatatggttcaactccttgctgtgatcttgaatacctgccggggtgtcaccattgtcctttttcctcgacgtgctttgttcttcgtcagaattcttccgtgctgtcttggtgtattgatccgcgaattgcttgtagactaaacattcttcggccacgtagttggatttacgatggtgcgggcattgtgagttcatgatcttgtcgaacgtgttga

SEQ ID NO: 76709 - DNA, 442 bp, Oryza sativa
tgcgcgataccatcactagggccgaagcgagcttcttctatttcattcgaagctacctactcacccttgcccgtgaggtgcctgttggatgcatgccatgaagcccttcagccgaacccgccaaaaccattgtaccagcaaagatccaagccaaagacgttcagaccattcagtcgaagccctacggcgaaagccataagcgaatgtggcgaacgctggatacctgcgccggtgcttcgcaagtagaggcatctatggcgaacggcatacagcgaactacaaaggctttgctttgactagatctgcatcaaagaggccctgcaggccgctccaacctatagggctccttcgccctaaccaacccagcctatcagccaataaaggcccagtattgcaatgacgctatgacccatataaatgtccttttatgaggcaccatgta

SEQ ID NO: 76710 - DNA, 428 bp, Oryza sativa
  unsure (1)..(428): unsure at all n locations
agcttactcataaggaatcaaaccaattgtgattatagcaggtactctgagaattgacagagatgagagtctggctaaatagtcagccatgtgaaatgccttaatgaactctgtatttcgatagatgagatagctcatttaggcagtacatacatgacgtgggttcttcgatccattcaaactctagtgctgatccatttatagatatttctcccttgcatatgctctntgcattgactcccaaccatataacattgcggggccctaaaatttatattactacctacacgaaatcagtgtaatgcacaatgttatttttatgtagatatattgcactcttaaatttgtgtatacaaatgatctttatttttaggtaatacaatattgctaaagtacctaaatgaaataaatgtgacatgatatccaac

SEQ ID NO: 76711 - DNA, 380 bp, Oryza sativa
  unsure (1)..(380): unsure at all n locations
ntatccgcctncaatctgtccacgcatcgaaagagtacttcttgcccgtaggatcttctgtatgaaacaccagatttataaacataagaaggttaacgacgttgaagttgacgcctttctactgaattatcaggaaggctgccatgcctgaaataattgaggaagggcactcgccaatcatcctcttttgcagcagcggccatgacggtatcgacctcatactcgttcgggaggagttccagcacagcaggtagcaaccacctctcctctacgttcacttgtgttggccctccttgcggaagcaccagcgctgcagcgagttatggcaatgcatcagctggggcatttctgctgcgtggtacatgcatgacctcgatatg

SEQ ID NO: 76712 - DNA, 431 bp, Oryza sativa
  unsure (1)..(431): unsure at all n locations
agcttggcaaaccaaccacatatccatatatacagagagtgtgtgcaaagcatattgccctgatcaataattgcagctcaccatcatgctcctcagcttatggtggttccggtatgatcgaatcgatgcctaacccttttgatctggtggcatttattcatcgcacatgattgcagcggttgcccgaatctctgttctaattccctgatcccctctcatncatggaaaggaagtacaagcccacacatccatgacaattggtctccacaggtaaacaaaactctacttttttgaccatagcgatatgccgatcgatgcattcttgtttctgttattatcccctggggaatcaaatcatccatgcttttgaaggctgaaaacgcgctatctcctgctgctacaacctgaacaagttggtaaagtacagtaca

SEQ ID NO: 76713 - DNA, 432 bp, Oryza sativa
  unsure (1)..(432): unsure at all n locations
tctgaacttagatggatatggttactacaaattctatattatctatcaaaagatctagggtgaacctccccaacccaaggcatctctgcagatgcaccaaatcagagaagccatgggacatgtaaataaaaatgtgattggtaggcccaacagctccacattactgacaaaactctaaacctccccagccttttttctttagatgccctgcagattgaattctgcccttcattgccagccaaatgaagagcttcatattcattggggtaggaccgtacgacatttccaaactcattgcatgtggatatcnttgatacctctgaaggatatagcttcatatatagaattagtaagtgaactgcttattatcccgcagactccacggcaagatatcaggggaggttttgaactcgagctcatcaataatctctc

SEQ ID NO: 76714 - DNA, 430 bp, Oryza sativa
  unsure (1)..(430): unsure at all n locations
agctatattgtaggttatggatcgtacatggatgtactacatgaaaagagctcatccaacgttcttgaaggaagcagccaaatttgttgagctcgcaaaggcacatgctgtgagggagaatttgaggagcattttttgcccatgcaaagnttgtatgaacgaaattttgctgcaagatccaaatgaagtattgtcgcacatcgttgagcgatgatttaagaagggctatgatatatggacttttcatggggaagtcggnggtcataacgaagagttagattatttctgttttgatgatgcatacaattttataatctaagacatgtcatatggaaacatgccggaatatggtggctctagtatagagaatgaatgtattgattntgatctggaagatatgttacggcacgttgaaccagtggtcataact

SEQ ID NO: 76715 - DNA, 419 bp, Oryza sativa
  unsure (1)..(419): unsure at all n locations
agcttaaggatgtgcagtgcgtcactggatgcttggtcgccctgagtcganttatatcgaggctgggtgagagggcgctgcccctattcaagctcctcaagcgctccgggccatttgtatggacggaggaagctgagcaagctctcaatcagctgaaagcttacctaacttccctcccgtcttggtggccccgggaccggaggaaccattgctactctacttggccgcgaccccccatgtggtgagtgccgccctagtagttgagcgtgaggaaggcgaacgggaggccccttctgcttgcgatggcccctcgtcccccgaaggcctagcgcccaaaagcttcagcccccgggaggaccccgaggcccccaagggaggagcggaggctttggcatgtggccccgagccttatgatcccg

SEQ ID NO: 76716 - DNA, 315 bp, Oryza sativa
tcttgctggtcgagcagatcgatccagcttgttggctgttaagatcgatccagctgctgtgtatatcatcatacataaataagatgggaaagaaaggccggagtaatgcaagcgaccgtttgaaaacatgaagaattgaagatgaatagacgggactaatttcttcgggcagtttaattcaatttcttgccctgtgcggccactgatgcttccgtttcttcatgcacacgcctatgaagcgaagaggttgggaagcgggtgcttggaggcgcgggaaggcagctgcggcacaagtgtgcgacatctccgggagaa

SEQ ID NO: 76717 - DNA, 414 bp, Oryza sativa
agcttgtagctgccttgcatctcttatgatgatatggtccttgattgactctgccaaattcattctaatgtatgatactatgattcctttgcaggctaaggggcgtcttcataggtgggactttgagacggaagaggagtgggccaaatacaacgaccagaaggaagcgatgccgaaagctgcattccagtttggagtgaaaatgcaggatggcatgaagacgaggaagcagaacaaggaccagaagctcacgaatgacctacacaagattaacaagatacttgcgaggaagaaaggtgacaaagatggaggggatgatggtgggcattatgatgatgatctacctagtggcaagaagcagcgcgcctgatgcaagccactaatagtttatcctgcgagaggtgtaaaatgtat

SEQ ID NO: 76718 - DNA, 441 bp, Oryza sativa
  unsure (1)..(441): unsure at all n locations
tncagcaacagttaagagaatgaagntactctctgtgtgtcaaaataaagaaggaacatttaatgacacatttttttgaacggtacatttaatgacatattgcatcctggatgtagaggctggggatgtatattaccttccttatctaaaaaacttatcaatttttttttgaacactcaaaatctttgcacgtcaatatattagaaatctataagaatgaccatatattacagtatctcaaaatctttgcacgtcaatatattataaatctaaaagaatgaccatatattacagtatcttaatatactgacctgaataccaatggacagtagtcctttcaccggaaatcacatgactggtgaggaggagtatgctttgatccttcaagaggaaatcttgtccacaccttctctttcngatcaaatgcttgatgattaagat

SEQ ID NO: 76719 - DNA, 420 bp, Oryza sativa
agcttatcatgtgaattgggtaattaacattgcatggtcatcaagtctctccttaatatttatttggactaaacaaatttagttagttaagacctgctagttattaatcccttggttgctggccacattgggaagtatggtgattctgcttgaaaggtcatacaagtatagcctatgcccctcaacatcataatatttttacatccccatggccctcgttcatttgctggtttattgagtcgtatcgcgtaaactggccttcaactattgagacacaatactgtttatgtttcaaaatatctgtatggtgaaacgaaacgttatctgattccgatgagttctttacttcttacaagtgagtttcattctttgggtagaggcacatggtcatggtacttatactacatacttttttcctta

SEQ ID NO: 76720 - DNA, 457 bp, Oryza sativa
  unsure (1)..(457): unsure at all n locations
ngcactctttcttgtccactctccaaagcctaccatctataatatggcatatgctactaaggagatatataccaaatgagaactgaagagaagctctccatatgaattttgcattgtgacaatctataaaaagatgttgaatagtctcatctttcatacaaaagcaacatcttatattaccattccaattccgtcttgtcagattatcgttggttaacacaactcctttgagtaagtaccatgtaaagattttaatcttaacaagcatcctaagcttccaaattatcttgttcctctcaatataaccattattgattaacgcaagatacattgacctaaccgaaaatctaccattctgattaaagttcatttgaaactatcagaagagtgacttaactggatatggacgatagaagcacacaactcatgccataaaacaagattctaaccaactaaa

SEQ ID NO: 76721 - DNA, 423 bp, Oryza sativa
  unsure (1)..(423): unsure at all n locations
cggcagcaactttaacaaaatgttctgacctccttgtctacacaatgatgcccttcaccggaggccatatgcataacattctctttccccatttcatncacttcagacatctctgaagtctgcacctgtactgggataatggtggggagaggagtacctggataaactgatttctggtacgcacaaatattacaagaacagttgggcccccgtcttgactgattgagaggagaagccacacacctatccccatccatgcctcacacgacaatgctctttttctcttctccgcagactatcacgtagtgataatttttttctttgaaactatgagcgataatctctccctggaaatcaaacccgtctcaccgtgaatcatatggaggtgaaatattcaccactattttcgttacaagtctatct

SEQ ID NO: 76722 - DNA, 446 bp, Oryza sativa
  unsure (1)..(446): unsure at all n locations
ttgagcgtcgtanaatgaggggagcgattaatgtatatatnatttattataaacnatttttaatttgaacataaattgatatatatttctaaatcaacttttctacagttttttaaaataaatgtatcacttagcagttcgaaatacatgcgcgtgaaaaataagtgggttatcttgtaaatcatcttgtactgaacacacagattctgagaaacaacaaataaggagttagactatgagaatttgaaaaggctgagaaatctagcttctagcttttagctaattttttaaattatattattacaggtcttataatataaaaaaaatctaaactatttaatcatttggatatttttaaagaagctctctaaacagcaactgcaccatcggttggttatttgggattagtcaattacatattacatacgaaaattattataataaac

SEQ ID NO: 76723 - DNA, 436 bp, Oryza sativa
agcttgtcattcttcatgtaattccagagctcatcagctatattatctggtttttcagcaagcagtctaactgtatccaaaaaaaccttctgcacaataaaaagaaggcaaaggaatgaaatctaaatgactttgagcatttgtatgcaagcaagcagtgaaaaattacttcctattacatctcgtttccactaattgtagcaaggatgaactatgatcaagcggaataaaacctactactccctccgtcccataatataacaacctaggaccggacgagacatttcatagtacaacgaatctggacatgcacatccggtcctagattgctatattataggacggagggagcatttagctatttcctctgttacaaattactagctttatccaaagtcaaatatttatatcctcgaccatcaatttctataaattc

SEQ ID NO: 76724 - DNA, 369 bp, Oryza sativa
tcactaagtgatttatttcattctaagtttgggcgaaaagagacttgcgtctcgattcgactttaagagatgcttctcaacagctcatttagttatgtaccgacctcccgggtcagatcattacttctcggctcccagagccattccacttgattaatctgctcccagagcctttttcattttctcggactcccagagtccagctgcccagcaacacaacaatccgcttcactcgggaacctagtctatgatcccgcagacatccaatacacaattcgttctgccactcagcatccattgcacatggctgatcggttacattccccacacacaacttttacaagcacagcaacaatctacgcacggacc

SEQ ID NO: 76725 - DNA, 308 bp, Oryza sativa
cactacaaggtaagctgagaaatttatcttcatcgttataacgggggtgtcatgctgatgccttggaccagagaaaaaaattttgaaaatcgatccaacataagaatatctgtgcaattttaatcgtctacaagtgtgccaagattggatgatcctcttgtacgtgtcggttggtgggttatacattgcagttgactactctttataacataacacttaacattgaatcatcataaataagatttaatcaatcagttcattctaaccatgacgcaagatacattatttaaatcggaaaatacctggtt

SEQ ID NO: 76726 - DNA, 380 bp, Oryza sativa
  unsure (1)..(380): unsure at all n locations
agcttggcatactaattatgttccctcaacttttccaacaccagacggagatggtgctgatggtcttcctctgattgtgagtatatcagaatgtcatcaatgaaaaccacaacatacttatccaagtattccatgaacactatgttcattaagttcatgaagaaggcaggtgcattggttagaccgaacgacatcaccgngaattcatacagcccgtatcgcgtggtgaacgcggtcttatggatatcttccttacggatacgtaatttggtgatatctcggaacgaagatcaatctaggagaatacagtggcacctttaagctgatcgaacatatcatctattccgggaaaaaggtacttgtttttgatggtgacttca

SEQ ID NO: 76727 - DNA, 324 bp, Oryza sativa
tgcttctgattgctggttgaagcgaataacgtgtcttcttcttggtatcgccctccggaagctgattgcctcttgcttggcctggagtaagtcagtgagagacacaacttctttcatcgacgacaattctttgctgaggctgtcggcgcagagaatggttggtgctgaaagttttattgccatagtctattgcggaatcacgtgcagcaggatgaacatcggtgcttgggatgatatcctccatgttgctgttggagctaactatctgatgagacaatcttaggggtattcgtcggattacttcagtcttggtccacaacacac

SEQ ID NO: 76728 - DNA, 433 bp, Oryza sativa
  unsure (1)..(433): unsure at all n locations
agcttatccaaagtgggaatcaatgtcttcctgtcaaatattttccgattttccttttcaactctctctaaccatttatgcaactccaccatcagtacaaaactatgtttctgcaaacggaaactaaaagttgttataaaagatgaagacagacatgcaagggagtatatacaccatgcatgcacatganagtgaagcgcacgcgcgcacagagaatgcttctcacaactctctttaggatattattgtcttgtaaccacactagtatgccctcctttatccatccttgtttgaacgaacaaaatgatataaaacagttaatctagttttgtataaatgaaaaacatgaaacagttaactaatcattagctgccacatcagaaaagtagggtcaaacatgccagagatagaggccacaacctggagatttaaa

SEQ ID NO: 76729 - DNA, 455 bp, Oryza sativa
  unsure (1)..(455): unsure at all n locations
tcttcttaacacccactgcaccccacagatttgcctctttggtcgctctgncacctctcaagtcccattagcaataatggaattcatttcactacggacagcctcctttcagtagtctgcatcaagagatgcatatgcttctgaaatcgacttaggagtgtcattcacgaggtacacagtgaaatcatcaccaaaagacttaaccgtcctttgtctcttactcctccgaggagattcactgtcatcctcctcaatgacatgttcacgcgtatgttcattgtgatctggttgtgtgattgaactgggaattatttcagagggttggctagaagtactatatgtattcttcaattgaaaaatgctctcaaagaaggtagcgtcactagactccataattgtaccaacatgcatgctttgtacctcagatttaactattaaaattattggcaacgctg

SEQ ID NO: 76730 - DNA, 435 bp, Oryza sativa
  unsure (1)..(435): unsure at all n locations
agcttgcagattacacattcatagtacctctcagtccagntgatccgacagtgccgtccagattgtttctagcaacatttctgcaggtaaatatctttgttttttcagtaaaaaccattgtagaagaagcacaatattatctgataaatgcaatttaatttatcgggtagaactaaaattactcacatctcagtcaaattcccgacaaggacaagggagaggacttccaacggcagcgtccccgtcagagaattcccgttcagccgcctgtggacaaaatacaaaaactactgtcattttttttactgcagcaaccgatttttactatgattattcgacaggtttgcgtctatactgtagaccttacaaaagataaaattcggtttacaaatatagggttccaagactntttgatggtcagggtttcaaaatttc

SEQ ID NO: 76731 - DNA, 445 bp, Oryza sativa
atcctgagacccaatggaatgttttttagtggtgactatcttcctccgcgttggcattctctaagcaccaaactatctctctaacataactcaatttgattttcgatccccatagtgcaagttcccagagaatatcctcaaatctatttgacacatgtgaagacaaaattaacttgagcaatattgagtgctatatatacattggattggtaaattacttaagaaactcttagcgacatattagccctgtttgtttcatcttaagattattgtaatctaaatattgagcgtgattactataagctgggattatataagccgacgttatataaggttggaggtcgtttggttcgctagatcatgagtcttacatactggttgccacttagttaactataatagcacgtttataaggcgtaccctattatagtcatctgacttatga

SEQ ID NO: 76732 - DNA, 436 bp, Oryza sativa
  unsure (1)..(436): unsure at all n locations
agcttatagtactaagtagtgggtatagaaggtatagatgtatcattgggttttgactctcagtgacacagcggtcagttacccaatctctaaaaaacaaacccttttcaccataggcgagcaacgatagcgagctatgtactacacattcgaaaatcgaaataacctcgtagtcttgaagtatccaaaggtgttacaaatttatcgtagaaaatgtgctctctttattagcatctactaaacaaaacgaaattctctctcttttttaaagtcaagtttcaatgtacgcctgacaactttacaggtgaacagaaatatagaattgacgaaacttgccaaacaggccctcaagataccttgaaccggtatgaagtctttgtcgtccataacgagatcagaagagaaaaatgagcaaaagacatcattnttcttgact

SEQ ID NO: 76733 - DNA, 442 bp, Oryza sativa
  unsure (1)..(442): unsure at all n locations
tcctaagccaatgaggaccttgaacatcaagatctactttttcctttgcagcaactagctagcaggttgctaaatatgttttgccatgaatcttcatgtgcaatggactactactgttgtcgtatttagtcctattataataactagataaggcacatgctatgagataacataccatcccattcaatttcaagaatctagacaaaggattagcatcatcacctgtgtgtattctctgtttcagtatatactaatacctggaatactattcttaaagcgggaattatatttcacttctaagctctagctggcatgaaaagttaccatcatgacaaccagtagtgacatttttntacctgtgcatgcatatggtcaaaaggatgcgtgatgataatagtatttatttgtctctatacatgtattatggcacttgatgggagtc

SEQ ID NO: 76734 - DNA, 429 bp, Oryza sativa
  unsure (1)..(429): unsure at all n locations
agcttgcatcaaacacctaaattcctgtgacttactgagtacgaaagtactcacccttgctctatataaatatatatagttcctccgtcgtgaagtaaagtgaagtgaagattatggtttcgtcctggttcccagcagtcgcctgtggtgttgggtgttagttcgttggttccgctgctgctgttgttgttggagtttcctcttccgtgtcgtcggttgcattctcgggctgtctgagctgcaacctaagttaaggtaaataagtcctctatttantttaaggtattgcaatgatttatatttgtcaccgtgggtaccagcactatgtcctgggactggtactgagatcgcggtttcgtaggaagcggttcgcgtcgttattctacgacacgcttctgtcaggtgccgntgtacggtggtgtcggattg

SEQ ID NO: 76735 - DNA, 222 bp, Oryza sativa
atacacaagcatctctcctcatgacacgttcgctacaaacaatatgatcgacacaattgtgccactgaactataacacgatttgtgtcggattctaatgcgtttatcgaatgaagatctcctcgctacgtcccaaggatatatagaagctgtgttcgccactgaatctacatgcggtgatagatctatactctctttagtatagtgtactgtggacctatta

SEQ ID NO: 76736 - DNA, 424 bp, Oryza sativa
agcttaagggtataacacaaactagcaagtgctaattagctacctgacatataacttgaggcaaaatcatcgattaccgcaacaccacaatgtagttcggatgctatttcgatgacaccttccgggttgccattaaaaaacagcacaaccagttgcttcatgaagtaatatactgctacccgataaaaatacggttgaactgtcaccaattgccttactgccagcttttgctgatttctccagtccagatttggttaaaacacatagctgtcatcttatgttatattgaatctgcaaatggacaaaccagacattataacaatagatagcaccgatgaaaaaaatttatatgtttgtccccaaagttgcctttgtgggtttgcatgtcacagcctaacgataagtgttagctcgtgattaaaag

SEQ ID NO: 76737 - DNA, 431 bp, Oryza sativa
acacatagaatctaagcttcttaatcagatgaagcctccgtagctcagaatttggactgcaaatagtcctttctcaagcgaggaaagtgcatttgaagcagctacgttttctgatcccagtggaaactctgctgaatctgtgattttaactgctaaagaaaagtcttgccaatctaaaagctacctgttgagctatatgagggccttgaaacttgctaggcctgttgaaggagaaaagcttcctgagaactcttctaatagtaagaaatcactgtgagaaatacactcgcactgcatgatgttgacaaaggagggtcttgttctgaatatggtctaaggtctgaaaaatgttgggctgcaacttatttgccggtcttgagttgaaaaagaagtctaattcatttcttcaaacaaggacactgtattagtga

SEQ ID NO: 76738 - DNA, 412 bp, Oryza sativa
agcttgtcgccttcaatatatcgtcgaaccatttaccggaccgattcctcgggagctggcgcggtgtacaaagctccagaggcttgatctgagtaagaactccctcactggagtcattcctcaagagcttggcacactggtgaacctggagcaactgaagctatctgacaatagtctgaatggaaccgtaccaagcagtttcggaggcctttcccggctcaccgagctgcagatgggaggcaaccgcttgtccggccaattgccggtcgagcttggccagctcactgcgctccagattgcgctgaatgtcagttacaacatgctatctggtgagatcccgactcaactaggaaacttgcacatgctggagttcctttacttgaacaacaatgagctagaaagtgaagtccct

SEQ ID NO: 76739 - DNA, 387 bp, Oryza sativa
  unsure (1)..(387): unsure at all n locations
tgcgttgctcctgcaagtggctggtgctactactcccttttgagatctggaccatgcacacctcacatgcattcttncatgttatttctttttttttaaaaaaaaaaacgaaacataccggcacttatacaggtcgaaatttcattgaatatatatcaggaagaatgattctaagttcaatcttccatgttattgatcttatttatacgcactatgatgatcatgatatgatatgatatgatatgcaggctaactaacctcttgttgattgagcatttgaccacctatatttaatcaacctgcaccgtggcgactcggcgccgatcgcatcagcgggacaccagctggtgggcggtactcgccggcggttactgcgctgtacaccac

SEQ ID NO: 76740 - DNA, 347 bp, Oryza sativa
aagagctaaatctagatgggttttgacaaataaaccggctagtggagccgatttaagataacttctcgtttcgtgggcaaaacggaaggttttcaggacaaacctacaaagaaatgtcgcactctcgcaacggcggcggacagtttacggtgcaaaccgacaaagatggacaaactaagagaaaactgaaagcaatatgaaaaacgacttgatcgattgattgtagattggtttttacaatgaaccacgcatgtcccttatataggggttggtcttggctctacaggcccttctcacatccaactcggggtagaaactataggaaacccgaacatgccttcccgagc

SEQ ID NO: 76741 - DNA, 358 bp, Oryza sativa
ataggtttgagtcattctagttaagataagctagttctctttagtaaaatgatgaatagctgctctgtggtatatctcttatatatggggtcataggtaagtgctctctcaaagtgtaaatataagtagccaacaattatctgcgagcctgaggaaaatgagctgcacttgctaatttgagtctaggttgttgcgagatatgatatattaaataagagttgcgatgatcctgatcctagtttgacttgaattccggatgtttgtttctttcaaatgataaaatgagagtcctcattgatataaatctacgagcaaactgtctatatgatgaccaatgatttggtcttgccatcttgac

SEQ ID NO: 76742 - DNA, 407 bp, Oryza sativa
tggaggagaagggagcacgttttaattgttctttacagcttgttagtataatttctctggctggcgaagttcttgacaagtatattcaggcacattcagaggtaccacctctcttttaatcatttcgctgtttattttgatagtggtattttactatatactttcaaaaatccatgctctaatttgagcaagaagaatgcatagttctgttgatttccacgccctttccatatagtgtgcatgtgggagcatagtcagcgtaaagagatttgtgtgttctgttcgtgtacacccatgagaagaacttgccactaagtgatgtaactcctacgattttcatgaagctatgacgtcgacccccggtgttgagagctgaccctctagttaggatgcgctacatgtgaaga

SEQ ID NO: 76743 - DNA, 325 bp, Oryza sativa
  unsure (1)..(325): unsure at all n locations
cctagcgtagttttgtttgaccactgcttgtgaaattgctgttgtggaatgggttcgatgtttggaaaaatctgcggttgatgggatcagccaggcccgggtggccgtttgaaaagctgttggccgggagccaaccttgatctaatcaaagactgatacattgcacatactccgaccggacgagacgcactgtctcatccatgttgattgagaagcactcatatagttgtttcaaaaatgagtttaattaaaatcaatcgcagaaacaatagccctttctttgaagcctgcatttaaacacttaanttccatgacttgctgagta

SEQ ID NO: 76744 - DNA, 168 bp, Oryza sativa
attgacttaggagtgtacttcacgaggtgcacagtgcattcaccaccaaatgacttagccgtccgttgtctcttactcctttgaggagctttactgacatgctccttagaacgaaatcatgtgtatgctccgattgttctggaggcgtgagtgaattgggaattattt

SEQ ID NO: 76745 - DNA, 310 bp, Oryza sativa
atgcacggtccaaggggcacttaacgattagcttgggaacaacgtcgaggcctacgtcgatgacattgttgtcaagaccaagacaagcgactcattgattgacgatctacgggaaaccttcgacaaccttcgacgatatcgcctcatgctcaatcctgagaagtgcacgttcggagtaccattgggcaagctgctcgggttcctcgtctcgggcagaggaatagaagccaaatccgagaatatcaatggcatcgaaaacatgaagtcgcccacaagactcaaggaagtacagaagctaactggatgcatg

SEQ ID NO: 76746 - DNA, 213 bp, Oryza sativa
  unsure (1)..(213): unsure at all n locations
ttctttaatgtaagaataaagaattgaattaaagggcttgctttgacccttatgagtatgtaacccgttcgctatccttgtttctattgcattttatctcatcgtatcacattctgttctacgattccacttcgacaaaaggaaagagcatacccaagttcaatagctntacgtccgctatcccgatcatggttttcctaccctcagggggaa

SEQ ID NO: 76747 - DNA, 116 bp, Oryza sativa
attctcaaaccacatggtgtcttcggttatgtatatgttggttctttctcatgaatctctcaaacaaaaagagaaattaggttccttgaatctgaaatatctcgttttctgcttta

SEQ ID NO: 76748 - DNA, 296 bp, Oryza sativa
  unsure (1)..(296): unsure at all n locations
cttcctgacccattggaaggccagctaaaatatgcaacagcttcttgtgatatcaccagatgatgcttggggtcaagatcaagcacaacaacatctttattctggacctttgcgggctngcacaaagaagccggccatatggcaaactggttatcacgaagcatatccatattgatgccaagaaatgaaccaaatccagacggtctatcgttttggttgagtatctgaagtgtcttttttaatctgcaactgggttagtcataccgagcttgtcaacctccttcatcaaacaagca

SEQ ID NO: 76749 - DNA, 252 bp, Oryza sativa
agcttagttgtattatatatgtggaaacaaaaatggaaatgaccccttgatcatgagagtatgaaagatatctaacacgagtcacataaatttgacaaaactcaatataatgtcaagcaatcatatgcataataaggcttatcaatgatatacttgcatatggccttggtaggtataaaatgaagtcaactggaggaatgagcttcttaaaacaatcttatttttgagaacaaactcccaagagtcataaca

SEQ ID NO: 76750 - DNA, 267 bp, Oryza sativa
tttggcaaattcagaacctgtaaaacgagtatgaaaacagaattgaatagtctgacgggtctgaaatctgaaccaagcaaaaagatcaacctgaataatctcaactcagctgtcaagccagagacgtcctgaaaacgatcgagatgccctcaaagtattgctgccacaagtgatcatggctggcagctactgtacgcacgagatgcttgatttgatccagcggcggaatgcggactctcgcgctgcggcgtgggcgtgggggcgccc

SEQ ID NO: 76751 - DNA, 213 bp, Oryza sativa
tgctgtttttttttctttgcattttaaacaatggatactttgaccgttgccacaacatttatcattttcttttcactgtcttaagcaatatgcgtgacagcagttgtgctgggtgttgtatatggcatcaccaatacctttcgaccactgccagatgatatattttgttatgggcaagacatgatatctctttccatgctaactacaatagat

SEQ ID NO: 76752 - DNA, 387 bp, Oryza sativa
  unsure (1)..(387): unsure at all n locations
taaacatttttaacatttaaggatattgccaatgatcgtgcgtacacgaagaaaggggacaagcgaatcttaattgatgaaaggttgttatttctatctgtttcacaattttggtcttctcttttctacttggaagttggaagaaatagtatggaccttctataaagtaatcttagcatgctagctntatcntcttgttcattcctggaaacctgctggttatgttgcttgatataattcgataccgactacaactgccaaagcacatgatagcatcttttcatatttgtagctatattatataactatctgtcttggggcggggagcttctgctgctatatcatcttattatataatggtcttgttgacactggtctgcagtagtg

SEQ ID NO: 76753 - DNA, 342 bp, Oryza sativa
cccatccaaacaggccctaaggttcatgccctctgtcaggcatattttgaatgtaccttttaagaatgaaccttctaaatatggatgtggtgcagtgctcaggtcacttctctagcgaaactgtgatgcttcattccatttagtaagaatattggtactgttcaagatttgataccatggagtgtctgtgtctggtatggatcaccacacttttctggtgttcgacaatcattgttagttgctatatgctcggacttatattaagaatagatagattcttatgacgctagaataaatcgagcacgtgctactgaatatgtgctatatctcttcttttttgcg

SEQ ID NO: 76754 - DNA, 377 bp, Oryza sativa
  unsure (1)..(377): unsure at all n locations
aactgattgcaaaagaaggtaaatcggccactttaagattaccatctggggaggtccgtttggtatcccaaaactgcttagcaacagtcggacaagtgggtaatgttggggtgaaccaaaaaagtntgggtagagccgggtctaagtgttggctaggtaaacgccccgtagtaagaggggtagttatgaaccctgtggaccacccccatggnggcggtgaagggaaagccctcattggtagaaaaaaactcacaaccccttggggtattctgcgcttggaagaaaactatgaaaggaaaaatatagtgatagtttatcttcgtcgcgtaagtaatacgtactacgatatggaacatgcattctggatttcaataatg

SEQ ID NO: 76755 - DNA, 199 bp, Oryza sativa
actaggatgaaaccagcgcattataatgctaaaagctcaccaaataatctttgattgtcttcatcccaagctataccatttagaacatcgatttcctggaacatggaatagattcattaatgtcataatgctatgtcttcctgctaagctacaatatgattttgaacatcatgaagctcacctgaccaaacaatgatca

SEQ ID NO: 76756 - DNA, 376 bp, Oryza sativa
  unsure (1)..(376): unsure at all n locations
tccctgtgagcgcggagaccgctaaacaagtcaagattttgactcggtgtcctcgccgtctcgccaatggcactctgggatcatggcgtcgtggggttaaaatacggtgctctggggcactgcttgtcactccacttgtgtaccttgcaagtttgcaaccaccatggcgatggctcttgctagcttcctgctgctgctgctgtccgtcttcatgtccatcttcttgcacttcatggcagtgcgaggagcagacggagaagacgccgcagcgttgctcgctttcaaggccgtggcggtgggcaacggtggtggcaactgcgtgcttgcgtcgtggaacggcagcgcccggccgtgcanctgggaagagcgtgcgtgt

SEQ ID NO: 76757 - DNA, 313 bp, Oryza sativa
acactcacatgaggtgagggtccaatgggtctccccttctttgacttcttttctttagtgaagctttgctttgttcatttgcatgagctagctagacagattaattaaaataaaatgcttgttacgatcattattcctcacaattcccattgaattcttgccgattaattaatcacaatggacattctatagattagtgcgcatgtgcgtgccggtgtagggtcaaatgagaacaaatcgaaggagtgatattaattagcaaacaagagaacatcctttatgtcttctaagccatgtataaactatagatgct

SEQ ID NO: 76758 - DNA, 309 bp, Oryza sativa
gacatccagaggactaaacaaccaaccaaatgatggttgctaataagaattgttttccaatcatccatcttgtttctcattgctctattctccttttggatgagatatgtaaaacacacatgattccgattccgttaacagtaaaatctcccaaattatgggtaatccttttccttcaagcttcttttgaatgatcagcaagcaacgaatggataaacatatacagtatttgaatttgacagcttctgacttctgaggtagtatgaacttgttacaaccaaatgccacatcgttggtgcagtgaatgtt

SEQ ID NO: 76759 - DNA, 337 bp, Oryza sativa
  unsure (1)..(337): unsure at all n locations
gatttcaccaaacactgaatgttaagttgagaactggcttgctttatttgatcacactgatatgtatctatgaacaacgttgctgtttcagtgtggataatgtacaactatacgtgagttgattctttgaccttcaatgcccattataccacactcaagtatacttattttacggaaatatatattccaattatatatttttattaccattaagctctgaacagggtaaacaagaatatttatgaacagaganaaaaggtgtgttggaactttggaggtgaaaacaacctcaagataggcacagttcagccatatctcttgattctcaacatacttg

SEQ ID NO: 76760 - DNA, 294 bp, Oryza sativa
cttgacactgaccacagcaatattgtagctcaaattgcaatgctgcaatacgcctaccgcgattcgtttatttggaaggtacactttaatctgctaagaaacacaatgtgagaattaaagagtatctcaaatgcacaagcaaaacgagtgtttgtgatgccaaccttcatgttatcagcaatcttgttttcatcagcagatattctaaccaaacttgctgaagtcacaactcttgatgtggatccattgaagtctatacatacacctgtgcaagcaaaaacctttttctcctac

SEQ ID NO: 76761 - DNA, 344 bp, Oryza sativa
  unsure (1)..(344): unsure at all n locations
cagcacaccattccaaagacaataccttcagatccgatttcttatccagttcagcatcagatgcttcagtgtgatcaataacattttggacatcaagcacaatgactttttggagcttccttaaatccttcagctcagttattttgtggccatctgttcttttcacactgaacccattcaactctcgaagagtagtcaggctaccaatctgagcgatcctggacactggtagtttaggaagatgcagtttctgcaagtgaggtagattaatacttatagatctactttcattttctttctcaatctttacgatctgaaggacctncaggtgacagagcttaaat

SEQ ID NO: 76762 - DNA, 387 bp, Oryza sativa
  unsure (1)..(387): unsure at all n locations
caccttgctggccatccaaacatcatctccatccggggcagctacgaggatgccatggcggtgcacattgttatggagctctgcactggcggtgagctattcgaccgcatcatcagcaagggatattacacagagaggcaggctgctgaggttgcccgcatcatcgtctctgtcatcgagtcttgccactctctcggtgtcatgcatcgcgacctcaagcccgagaacttcctcttcgttagcaacgaggaggatgcgccactcaaactcattgnacttggcctctccatattctctcgccaaggtaaatcaatcaatcagttatgacaccttcaccatcgaagaactgcattgtgttagtcgttgcaggcgagacgttcactgacg

SEQ ID NO: 76763 - DNA, 160 bp, Oryza sativa
cctaaagttcggtgtctgcccctttaagatgtattttcggtacagatctcccttgaaggtctggaactgatctgacattttcttaagagtccactgtttcactattgtcctctgacccccagggagcgtgaacgtatctagcattgtggtccacagcgtc

SEQ ID NO: 76764 - DNA, 336 bp, Oryza sativa
cgcccagatcaggtccatcccgttgcggctgaagcgctgcgtggagcggttgcgcggccggtcggcgagcagctggtcgttctccttgagcacctccttggcgagctccgacgtcgacaccaccacgttcagcgacgagccgaaccacaccgacacgatcgggccgtacctctccgcccactccaggaagccgcggcaccgcaccggcttgatctgccacaggtatcccaccatcggccacggtcgcgtgcccggcgggatccgtctcagccgcagcccgtccagcagcgctagcgagatcgggatcgccaccagcgccagcgcgaacgggagcag

SEQ ID NO: 76765 - DNA, 325 bp, Oryza sativa
  unsure (1)..(325): unsure at all n locations
atcttaccccctattatcctcccgttctttagacaccccttatttctttcatccttaacatttaaaaaacaaaaggtttgaaatgtatattntaatatgagggattagtgagcaagccattgctcaaaatgaaagatgtcttatcgggaatgattagctaatggttgtacgcttacaccctctgttccaaaaagaatcaactttcagagatgaagctaatggttgtacgcttacaccctccgttccaaaaagaatcaactttcagagaagaacttagacagatacttctttagaatcatcctcgaaagatgcgtctctatgggat

SEQ ID NO: 76766 - DNA, 359 bp, Oryza sativa
tttccaaagtaattcaattatcccgaccattatgtattccagcacacgccacttcagagttttgaatcttcttatttatgtcacgctcagcattacagaaccggacaccattgacaacacatgaagagtaagatcttacttttatgtcagggccacatgctgagggcaacacgtcattatcttcaatatctgaattgtgtcaccttcacatttgaaaagggattgccgattagcaaatcattaataaaacacaacgtatatctaatacaaaatgtgaggcaactaacatggttcttgatcaagtacaaatccaacctagtcgtttatcatatagctgcttgcacgctgttcctgtaatc

SEQ ID NO: 76767 - DNA, 378 bp, Oryza sativa
ctgcaacaagtgacaaagctccaagaaccttcagactcgattagtatcatcttcagacttcagtgagtgtgtgtgggactctaggagagatcaagatgtccatctccaggtcacagttaatggagatgttcatttctgcagctattggggatcttatcagaggtccatgtccttcttagttgggaagtactgcaactgcaatcatgcaactgctgatgagaacctacagaggctacggcagctgcttatgacgatcagtaccatcgtcgaggatgctgaatggcggcccgtagaaaccaaaggatgctccagcagctcaagatccttatagatgagatgttgaagggctgtacattctcgataccttagataccgagc

SEQ ID NO: 76768 - DNA, 354 bp, Oryza sativa
  unsure (1)..(354): unsure at all n locations
tcgcgaccgagaaaattgccttttcccgaacgctagtgtattaatccccgtcccaggaaaagccggggtacaccaaacaaacatgatacaaaaggcatatctttattatatcgataatatttacattattacaaaggcacttcaggcctgacaatcaaaaataaacaacagcggactagcgggcctacggctccatcttcacaggcgctcaactggngtataagccaggactccacctaagacttcttctccaaagcttctcttactgaanggtggaaagatagagcaagaatgagtacaaccacagtactcagcaagtcacaccgggagatgcatgantaatgcaagggagta

SEQ ID NO: 76769 - DNA, 356 bp, Oryza sativa
  unsure (1)..(356): unsure at all n locations
agactgttgccatatttgaatcagcttcattgtgagcacagttgttttaccagtgcctgaccttccaagtataaaactagtgagtgggaatcgaataatcgcctgctcttcatcagtcagttcaaagggaatatcaatttctgatccatcagtagctgttagcaaatgttttgccacaccagatgatagagagtagaacttcattagcaagaagctctcactggactttgaattctccatagcatatgatatgtccacatgatcatggtcttcctgagcatcaacttncagaacctttcgatagcgaataatatcatgctcggcattccanataacaggcactttcagtttcctag

SEQ ID NO: 76770 - DNA, 344 bp, Oryza sativa
  unsure (1)..(344): unsure at all n locations
tgtgctgttattgcttctttataggcctgtagctttgcttgtgtgcttcgcgtagctttcgtcgttccggaggttcccgaagcgtggntcgtggtcgtcgccgaaggttcggaaggccgttctctctgagcaaggcaagtcacatcatccttgagcatattgaatcccagtttataaagatattttgatttaaattaatgcattatcgctttattaaattcccgcgttatactgctttattatgcatgcctattacctttgtaagacattattatgtattgtattataccttgtcacctaaataacaaccccactatgggacttattctggtcacttatgatta

SEQ ID NO: 76771 - DNA, 236 bp, Oryza sativa
aaaaaaagtgctcgagtcatgaatgtttaactttggtatttaagaaatcaccgatgctgttgccgagaattcttttaccttgttagcattaatttcatcatgatctgaagcacttctagcttattctggattcttcgtagctagacatgatatttcctcttttggtgatatgcaaattctatctttcccctaaatcgcaatgttaatccattttaatccatctcataacattatat

SEQ ID NO: 76772 - DNA, 342 bp, Oryza sativa
  unsure (1)..(342): unsure at all n locations
tgcttttgtgcattgtcgacctgttctatgcatagatggaacttttatgacaggtaaataccgaggtcagatattgacagcaattgggtgtgatgggaacagccaggttctacctatggcttttgcatttgtagagagtgagaacactgaaagctggtactggttcctagagagagtgcacattgcagtggtgcgtatgaggcccaaaggttgccttatacatgatcgtcatgccggtatgttgcnggctatcgactactcgcagaatggttgggatgagaagggaccttcagctaagtggcctgatcgttcgagtccgctgtgcatgcgtcacatgggtgc

SEQ ID NO: 76773 - DNA, 344 bp, Oryza sativa
  unsure (1)..(344): unsure at all n locations
ccaaggaatcttaagtatgaaacaagcatgatgtggcctcagcaatatataagccaattacagatatgaattaaaagactatatccattttttttttgtaaaacttgctacagtacatcgtgaatttgtgacacataacatagaacaatctagaaacatataattattacatgatgctctagtttagtggtaatttgcaaagcaaatactaccacatctattttaatatttcttactttaatggagccgagataattataantgatgcctttaccccatgccaggttgtaggaccaacccactttatatttcaatcctgcttacagacatcacagcatttaaaa

SEQ ID NO: 76774 - DNA, 111 bp, Oryza sativa
  unsure (1)..(111): unsure at all n locations
ttgacgtggcgcttatgtgagaattcgatctaagaaaaaaaatcaacccgngagacccacatgtcagtttcacacatgaattaataaaaaatggtggggcctacgtgggct

SEQ ID NO: 76775 - DNA, 472 bp, Oryza sativa
  unsure (1)..(472): unsure at all n locations
gcagcctaaaccgagctccacctctctagtttattttgtcagagcgttccacccagctccgctcccattttaggtggaactgaaactgtttggctgtgctccagctctaggagaggtggagctgaagctggacttttgtatatttatttttgtcactacttattttagttttgctgttatgtattagacttgtatcaatgttgtttggtcacatggtttctcttcttcctttttgctactcaagtgaaataatactttttgagctattgaacattagaacatcctggtgtcgcatgtgtcgngcttcttatgtctntctatgctctacgtcaggtagctcagttatttataagctctgtcaatgccttgatgaagactatatctcatctatacggccttctcttgtactactattatatctttgcttatagactacatcatgtgntgctgacctgaagcttttccttttttg

SEQ ID NO: 76776 - DNA, 266 bp, Oryza sativa
  unsure (1)..(266): unsure at all n locations
tttctttcgacaaaaaatattcacttttccccaagattggcagcatacatacagattgaacagatgtaaggaccaaaattttcatataagattgtgatggaatgaatgtcatatgaagtataatatgcctcgctcactcatctcacctcacctcatctcgttcaaatcccttgttcatcaagagaagaaatcaaaatagccggaaacataaaaaggcgactcgaanggaatggaaaatngaacacganaagaaaaaaagagtcttc

SEQ ID NO: 76777 - DNA, 262 bp, Oryza sativa
  unsure (1)..(262): unsure at all n locations
gcgaggcacattcgtctactgcaacagcggaatgagcacccacattggctatgcaccgcanggtacattggctaggaagcaatatggtcccaaaagatgcagtcgctgcagtagcgaatgtccctgccccgttttcagacatctctgaacaaagagctcgcaacttggcgcgggcaagtgttatgcaaccccgaccgcttttcacatttgaatcaaaagagttccgtggctataggaactgggagttcactactaactaact

SEQ ID NO: 76778 - DNA, 245 bp, Oryza sativa
taaagaaaagaaagaaaaagaaagaatcaaacaattcacaatcaattctcttcctataccgacatacaatgtacaattcatggtagtttcaaacacaatctgtaaatttcaggcaacccgaaaccctctttggattcgttgaatgcgtcgtattgcggttgcgaacgaggttcttgacctcgaggacgatgatcttgcagatgaagtacgtgatgatgttctggtcttcttccttctcaccttcc

SEQ ID NO: 76779 - DNA, 306 bp, Oryza sativa
cctaattaatctataattagagaatgtttactgtagcatcacataggctaatcatggattaattaggctcaatagattcgtctcgcgaattagtccgagattatggatgggttttattaatagtctacatttaatatttataattaatatccaaacatttgatgtgatagggacttaaaagttttagtcccaactaaaacaaggtcctagagcatctccaaaagactctctattcagctcaccaagttaaaatttagccaacacaggaaagaaacaagctccaacagactctccagccatccggat

SEQ ID NO: 76780 - DNA, 342 bp, Oryza sativa
  unsure (1)..(342): unsure at all n locations
cccaaacagtaaaggagaattttttcaacctcaatgataccagcagcaagacaaacacggtggtcatcttcaccaaaagcaggagcacaatggacaacaccaggtccactatcatcagttacgtagttatccgctatcaccctaaaggcagtctcttggagctccaagaaaaaatcgaacagaggtttgtatctgccagtatgaaaagtaacagttaaaaacaggaagcgccccagatatatactccaaatttggctatggcagtatggcatgttccgtattggtctataacatctagaaaacaagtatcanggagtatcaactaagcttttttttaaactg

SEQ ID NO: 76781 - DNA, 235 bp, Oryza sativa
agcctccgagagcggattgtagcattgttaataaaaatatcttcaggaagtcatgaactaaaagtccttatgtgtcaatcaatagcactacggaaaggacattaaaagtgggcaagccgaatgcacaattgcaagtgagaaaattatcctaatttgtaattcatgctgggacatgtataatgcgattttatacatatcaaacacatgagaatttacctagtatctaataataaaa

SEQ ID NO: 76782 - DNA, 342 bp, Oryza sativa
acggtggcttacccttacccctgattcccacgagacactgcttctccttgccttgggcggttgaaggacagaacatcaattagagtaccaatcacccaatctttattcacctcttattccggaagtcttcaaatgatttttgcaaaagaaagccaagttcctcaaatgattcactcagtctctctaagtgtatcagtatgaatttcctcaccaaatgttgccttgttgattcctactctaaggtttgtatgtggagatcggtacggatcaaacatggcatacttgcattcacatttattactaagtcacaaacttagactagagcagatgactaaatatact

SEQ ID NO: 76783 - DNA, 405 bp, Oryza sativa
  unsure (1)..(405): unsure at all n locations
tttagatgtcatggcaccgcaacacatggttcaagtatttagtaattaatacataatctaaattagttattaaccttccgtttgtctggctttgttttcttgtgcgtaattatttgtagggttaacaattaaatattatattctcgtaaatttatctattacttaaattntagatccttactttactttctttgtgaaccattacggtttggcaagcaatagcaatcataacaaccagcatgacgcacaaatttaaaaagttcaaaatctaatgattttattgcttgaaattcacgatgtacattatctactcgatgactcaaattgatgatcttgtctaatgttctaatatgctcactgtttttgtttactgcatattgcatttcttgacttgttatcataaat

SEQ ID NO: 76784 - DNA, 381 bp, Oryza sativa
  unsure (1)..(381): unsure at all n locations
cccctaaaactcacatatatgaacacatcagggtaaaatatgtgaggaagtacctcgcacaaaagtaagcgtggaagtacggttaagtttgtccacgtataatatatgtactgcatgaacgtgagcactaagaaggagaaaattctctgagattgtttacctatggagcatgtagtagttagcaatctatctaatgagtgaaaacgtacgcctaagtaggaaattaaaacgaaatattcgatctggcaaatgttcgtactacgcattagcaacactagagacanaaatatgctgacaacaacaaagagcaaagagccctttggtgcgcttagagggccatcaacatttcccatacccaggctaattaattaattattagtg

SEQ ID NO: 76785 - DNA, 217 bp, Oryza sativa
  unsure (1)..(217): unsure at all n locations
ccagcctccgcctgcctccatgcgtcagtgccacaccatcgcgctgacgtcgttgcaagcctccatcttacgggtaaatgttcatccncgagcatctggacggtatcggttgaggtcacaacaacattccgcgttgcctctccagcaacaacacatncaccgatgtacatctgccaccttgcatcctacctcaacatcctcctcattccgcctccac

SEQ ID NO: 76786 - DNA, 321 bp, Oryza sativa
tacaggcgctgcatcgtattagtcgacgtggcagagaacgtgagaactgggaagagacacatcatgagtacattcaggaatgggaagcccgccgacagcgcatatttccagagtcagagcagtatgacccgtcttcttatgaggagtacctgcattggtacacaggggctacacggcggtatcttgtaccatcaatcagtgatgatgtggaagcaggatcttcattacagcctgatgactccattaatcttcattatcaagccaaggcttctatgatccgcaaagcagtaagccatattatctatttcagttctacgatca

SEQ ID NO: 76787 - DNA, 212 bp, Oryza sativa
aagctcgtccactccttcgcggggggcgaaatctgctgcttttggggccccacatcccgatccctgccttctgttgctgctgtcgtgtgcacggtacgctttttcctgcctacccgatttttgtggccagacgcgagggcgtaccggtgatgtacttacacttcgactaccttttggtcttaatctctcaccattaaaaaacgacgtttgtt

SEQ ID NO: 76788 - DNA, 260 bp, Oryza sativa
tgtctatgcactattggtacatatgatgaacaaggatgcgacttacatacgtacgtacctccggtgagcagggcgatgtgcagcaatgtgaggaggacgaacaaggacagaagcagtagcaacgagatcgagcagcaatgtcgccgccgccgccgcttcatcccttcctcctttctcatttgctccatgcatctatgatctatctctgccttttaattagtttttgacattactgaaatgttcgatgggttaatttacag

SEQ ID NO: 76789 - DNA, 179 bp, Oryza sativa
ctagctagaccaccattacgattctatacaagcctgtccgaacaatcaattggcccgtccatacattagaagacaatatttctataaccagtcatcgacctcaaacactaacctggtattgcgggagcacagatagatgctatcatgatctaacctaatgctcgcttaactctctacct

SEQ ID NO: 76790 - DNA, 465 bp, Oryza sativa
aaggtgatgagcgcgagttcctatttctcgcttagtgatgccccgatcttgacggtcttgtcggggttagcactggagagtggaacgatcttgattgcgccgtctggcttcggcgtcttgtttgtcttgctcactttcttgagtggctctgctgtggtaagcgggctgggcgggttctcgaccatgtcgaggctccgcttgtcgcattgtactgccacttagcgttcccttgatagtgattgtcccttcgtcctgcatcttgagcactgtaccatatgagagcggtataactcccgaggcattctccatgaggcttatatctgatgaatcgcgactaacggactgtcatcgaagtttgttgccaagtaagcacgattcccatgtggcaacaagagatctgaagtacgcggggactctcaggacctccccagcctggaaaagtatactcccccacactccactatc

SEQ ID NO: 76791 - DNA, 331 bp, Oryza sativa
  unsure (1)..(331): unsure at all n locations
tcttcggaggttccacggcgtactcctcaaagcgagagtacaagaaagtggagcgtgaagtttgttcaacatggtagggggctgcgcccaagatgaagtggtctgagcagaagatcgaattctcagaagaagaccaccccaagactgctgtcaccccaggacgatatccgattgtggtcgagcccactattcggaatatcaaggtcggacgggttctcatcgatggcggcagctccattaacctattcttcgccagtaccttggacgcgatggggatcccacgaagcgagttgacgcccactgatcaactcttccatggaatnactcttca

SEQ ID NO: 76792 - DNA, 249 bp, Oryza sativa
ctgtaggacagagaagaaaaattgtagtatgaacgggtgacaatagttggccagctctacatgagctctaaggtgaaaaagtctacgaggtatgaattttcaattttaaaaatggccatatgcccacacgtagtgagatgaatgcaatgaaagatgctattcaattgggtcccacaagaaaaagaaatacatctcgagattaactgctagcttactctagttaatgtggacatggatggaacttgcgac

SEQ ID NO: 76793 - DNA, 268 bp, Oryza sativa
taccaagataagtttatgctaattgtcctttatttttcaaaacacataaaaaacacgtctacctcataagatagtctgtcaagcagaggtcataccatgcttcttttgcaaatgagaagcgtatggtggacaagagatcctagctttagtcagtctgaatgctctccttataataaataaataaatagaatactgatcatgactaaagaaaacttccgccttgtgcattagcagtcatgccctatattgatcgaacctatccatgttg

SEQ ID NO: 76794 - DNA, 208 bp, Oryza sativa
gactgactcttttttcaacaaaatattcctcattctggatcttaacctcataagcaaccatgacggatgtgttaccggatacaacaacatatgccgcacgacaagcaggagtcttgacaggagtaaagcccatcttgtgagcgcagatgcattcactccaagtggaggctggctcattttctctacggacgaaagtacaatatcgatc

SEQ ID NO: 76795 - DNA, 387 bp, Oryza sativa
  unsure (1)..(387): unsure at all n locations
tatccgtttttgtaccggtttcatccctagttgtcggcctgtatatcttaatttggattcacagtcagttatcaacaaaatcaattttgtaccggggaatcaatggcaatgtccatcttctttctgacataattgccataaaactttggccttcgccactaaaaagaagaaaaccattttcacatcagccaaattgtctttaaatattacacttgacatgaaatttagaggcatcgcaccttgtatttaacctaactccagagctttatcatctgtaacctaaacgcatgctaacaatgtatatatgacaacattatcccaattattctcgaagaacaacattatttcaagggattccacttgaatgtgaactacacangaagctac

SEQ ID NO: 76796 - DNA, 345 bp, Oryza sativa
  unsure (1)..(345): unsure at all n locations
aaaccaatcagctagctctctcaaccgccaacctctcacacaagaaaggtacatcgaccagatcaccctatttgcaactggttcatattttttttcttcatctaagtattcttagaattgtagttccagaattccatgatctgaagctgtgattatattaatactatttcagataaaatataaaattttgaatcactatgatttaacctacaaatttcagatctagcacagatntataatttggagcggtacgtattactctcgtatttcttatagaagcatctacgcttttgtgtgctatcctacctacatgtgtctncttttactactcctctgtcaggatat

SEQ ID NO: 76797 - DNA, 446 bp, Oryza sativa
  unsure (1)..(446): unsure at all n locations
gaagctggatgcatgggggcgagcatggtattggcaatgaccaagtccttaaacccgaggatcgatattgacgctgtcgaatgctttgcagacgggacaagtgaagaagacgcccttgacctcatcaatgatgcacagaaggctgctgacaagatcgttgttgatgcagttgagaggtttctagacaacaatctcaggccgactgtgtctgatgaatctgataatggaaaaaatgagtctgattgacattgtatagtgtaacttatgatgatggaggcacantttgtacaatactgatgaaattatgctgtgtttcgataattaaactcaactccttgatttcttaaaagtttttgcaaaccttatgagcctaaaccngtaaagtcttgaaacttcagtctattgactagccaaaatgacaggcatgaaataagtacaatgattgt

SEQ ID NO: 76798 - DNA, 386 bp, Oryza sativa
  unsure (1)..(386): unsure at all n locations
aaattatcgctgttttgcggtacgctatcgccaggttatgccagaatcataaaaaagcaggttgggagtcgtcagggtgcagcacgagacaaaaatggaaaaccagagctggttgaaaaaactcgcacgccgcctgnggcctggtcatgtcgttaatctctgctttatcgtggtattgcttttttccaccttgctcacctggcgtgaagtggtggtgctggaagatgcctatatctccagccagcgtaatcatctggaatacgttgccaacgcgctcgataagcatttgcagtattaacgttgactaactgatctctttacgtaatggcatgcgcgaagctcttgtagcgccacttgatttcacctctctgcgtgatgctgtaccg

SEQ ID NO: 76799 - DNA, 362 bp, Oryza sativa
tattcacttctaaaaaaattcgaaaaatggataagagccgagaagtcttatattatgaaccttcgattctaaaattcaaattcttctacattgaatgtatagctgcagcaataaatttggatcagcctttctactccctgcatctacgttgagcaggtatctttaggtaaccgcacaatacctaacctaatttattgataagagtgcttattataaatcaattcttgcaatttttttcaaaaattgatttttgcatttttaggtgtcaaaataaacaaaacccatcctagtggatttgtgtggtaaggaaaaaccggtaatctatttcttaaaaaaaatcttggagatatggtatgctactc

SEQ ID NO: 76800 - DNA, 429 bp, Oryza sativa
  unsure (1)..(429): unsure at all n locations
atggagtagccaccagtttgggtagaaccatggatgcgttttgaaatcacgaactgcctaatagaataggtatcctcccaattaaagaattgatggtattcatatttaatgtacaagttgccatgtgccaaattgtcgtaggctctccggaccttccattatatttgagagatgaagtgaataattcaagtcatcaaacaagcataatgaaacatccgacacctcgagagaggaatattggagacattgctgggcccttagcctgccagtcaacttcagcctgagatgtgcccgtcaaaccactcgaatgcggcgaccagatgtgtacacattcatgagactngacaanaatggctgaagatctacaacctctcaatattcctacttcatactcatgtgaatctagtccaggatgtcactagatcacac

SEQ ID NO: 76801 - DNA, 444 bp, Oryza sativa
  unsure (1)..(444): unsure at all n locations
gtggcacaggactcgttgtattggacacgcttagtcacctaaactaccacgtcggggtaaataggaagctcctctgaattatacgaactcatacacaccggcctaccagaatgtaagactaaaccataaataattcactaagcttgggctatcccatactagcacatgtggctgtactgaatacgatatgaactgacattgagtgaattccttaagtcggtttgggcgcacactcctcctatcgatacataactaatcaccatatgtgcaccacttgacgcccaaacctaaatctattgtttccaccatttatttatcaaatcacaagtttaaagtctatcttgatatttaaaacaatttatgttgaatggcctanaactagagacatttaatctgctaacttttgacctatgtccaaaccatttaaatggtatcaattgtcta

SEQ ID NO: 76802 - DNA, 255 bp, Oryza sativa
ggaccggccttgcgcccggccgtacggcgagacggtgctcaatcacctccctggggaccccgggcatatccgccggtctccatgcgaagacgtcagcgtttgcccgcacgaaggagacgagcgcgtcttcctatttgtcgtccagaagaccaccgatccgtgtggtcttggacgggccgtcgcccaggcaacctccttgaccgggacctcatcggacgtgactattcgctgcctcgggtcggcgggggcggacgt

SEQ ID NO: 76803 - DNA, 218 bp, Oryza sativa
  unsure (1)..(218): unsure at all n locations
aacgtgacaggccacacctgaaaacatgggttgcagacatattaggcctaggccaaaaaatatgccttcgacaccctttaaaggatgacgcatgtaacatgctcccgagtaataaatcttctgggtaatatagaccaagtgtagctcatatgaatagcttctgatctgaatgattatcccttatgggatacttcanaataaatataataattgaatcc

SEQ ID NO: 76804 - DNA, 510 bp, Oryza sativa
  unsure (1)..(510): unsure at all n locations
gctccgtgcactagtggactggtcacagtcacagtatagctgcagctggtcgccgcgccctgctctgctcacttttgcatctcacggaggtggtttgggcgacaaccatggtttagtggttactgtgataacctctctgttaccgagaatataccgcgatttataaaactaaaaaagaatacggtacgtgataaccatgataaaaccttgctccggaccatgaacccggatggtaaacgtggatcatagttgttaaaaaatcatactacttccatacatatataatatttntccttgctaacattttacagcttagttaatgatacaaaaattactctaaacctacattgatatattcacaatatttgtttgaggaccacaactaaattctatacttgaagtactagtagaacaaatattatattgaatgaagagactttatggactatattatataacaaatttattcttctacgattagaaagtaaactatctgcttactaaattaat

SEQ ID NO: 76805 - DNA, 271 bp, Oryza sativa
  unsure (1)..(271): unsure at all n locations
ttgactagtatttagtcatttaattacatccaaactagtatttagtgagttctttacgatttagtgtttttttttatgttaacgtatgataatttggtagactttttaaaagaagagataatagctcattaatgagccgagttaggcttttagcttggtaaagttaacaagccgaggcgaaccgagctggtcgaccctctttctccccttccttccatatcccttcncacagctgcggaaggccaggcgagttcgtcggtgagcccgcgac

SEQ ID NO: 76806 - DNA, 251 bp, Oryza sativa
accggtggcttcgccagggcatccagctgatgagctgaataaaccccatgtcttgcttggcattcactacaccattggtccccatctcaacctttccgagcttcgcattttcatccttctaggcagaaatctgccaagaataccccaagcaccaaaacaccatcagggcgatcggtccatgacattccttattcgtcggaaaacaaagccaggtactggtggaattggatacacgatattcgccgtggtga

SEQ ID NO: 76807 - DNA, 286 bp, Oryza sativa
  unsure (1)..(286): unsure at all n locations
tcttggtacatcttactgcttccagggtgaatggaatacaaagtttcatgagcttctttcatgatagtatccttcaactccttaatttctgggacgcagattctttctcctaaccacacagttccttgctcatcttctacataaccgatggctttcctttctcatgttctttttattcttgatatcaagacatcactgagctctctacttgatcaaacaagagttgacctgaaagacccaaaactngttgacttatcagttactttcaatctggttactccaggaa

SEQ ID NO: 76808 - DNA, 360 bp, Oryza sativa
tggattcttctgattctagagtttgacatagagattaaggataaaaagagagttgagaattctattgcagatcatttgtcgcgtatgcaaatcactaacatgcacgagctaccgataaatgactatctgcgagacgacatgcttgtgaaagtcatagactctgactcgtggtatgcaaccatcgtcaacttcatggtcgcggcgcatttacccccgggagaaaaaagaagatgtgaatctacaaaccgcgggccttggggatgcaccttacctgacagatctgtcgacagctactacaaatgcttccgtagataaagcgctgaaatcattacaatgtcatgctgccccatggggcactat

SEQ ID NO: 76809 - DNA, 294 bp, Oryza sativa
  unsure (1)..(294): unsure at all n locations
ggttgtggctgataataagttaacaagaagactatgagaagcacaagaggaaaaaaaaaactctcatggaataggtatcacccggcccggcccggcccatggtgaatggaagtgggcctcacaaattaatggccctactttactgaacgtacagcccagcatgttgacggtccaaaggctgcatgaaagcagcanaagcaggagacctgaacctcaacagctggtgccctactactggtactgcgatagnatcatggccactaacatacatacatgcaggatccaccttgctgc

SEQ ID NO: 76810 - DNA, 362 bp, Oryza sativa
  unsure (1)..(362): unsure at all n locations
gcgagagagaaagcattcagttaccaagatatgaaagcctggtttcaaattcatatacaagttgacaacttaaatgattgaaagggttggaactgaagccaatgttacctgtagtattgtggttcgtctcttttacctgaagatcgctgtacgttgagtcagaaaagaggacagtctccagactagatgatgatgatgatggtactgatatagggagctacaaaaataaacgatagtttgaataatccatatggttccatagctcttaagaaatgganacaatctgtacgcacatggcacgaatatacagaaagccagttatgatatcatctaagcctctttactaattagcataatctgac

SEQ ID NO: 76811 - DNA, 293 bp, Oryza sativa
  unsure (1)..(293): unsure at all n locations
atgtctttcagtcgtgacacattattcaatgtgcattagcaaattacacaagtcttgaatgttatgtagcaaaatttgtcttattataaacaatgaaaaaaatcactattaaccagtgtttgccaactgtattatcttttctaggctttttggaaggcatcgaattttatagaatattcagtattgtaataataacagttcatgcaacacacgacctcttangtattggcttgagcatattactaccttctattgtttatgttgggagaacgttctccgtttgactagattat

SEQ ID NO: 76812 - DNA, 81 bp, Oryza sativa
gtgacattcttattggtgtgagcacgtgattccataagagatactgaagccttaaagatgatcccgacgaaagcctttgag

SEQ ID NO: 76813 - DNA, 325 bp, Oryza sativa
  unsure (1)..(325): unsure at all n locations
aagcagtggcacagccaagaaggaggtacgatggcggaggagagagggagtgtgtgagctgggagagagggtttcaaggcgcttaaaataaccgatgacttagtgaatgttcagctctgctctcttgatccatcctattggtgttgctttagttaaaaaaaacggtaccgatattattagtgtccaactttttataaagataatcaccgatgagccggtaccaggtntatatttaaggctccgcttaagagctgagacatacaagaagaaaccacctatatgagttattcccgcctattaagagttatgtagtaccctacgtata

SEQ ID NO: 76814 - DNA, 296 bp, Oryza sativa
  unsure (1)..(296): unsure at all n locations
accgtatacgtatgcaattcccaaatcgtatcgtatcagggcttaactagctactgcctctacttaaaatcgtcttattgatcaatctaagaacatcgatcgatcaaatcattgccgcgatctgcggcgagatggtccctgtcgagtctggtgggaggtcttgatcacggcaccaaccaaagacgttgcccggtcaagctgtgtgtccaagcagtggcgtgacatctcacgaacccctcctcggagctcaccagacagcacccgcgccgccaaggcnatgccctacgcttgtcgct

SEQ ID NO: 76815 - DNA, 330 bp, Oryza sativa
aggggtgttgaattaattgaaagagaatacatacataagtttgagcgtagtgatattgcctatctcttttgggatgttgcctgttaaattgttccacataaaatcccttcaagagaaacagcaataagttaatatatggtataagagattgatgcaaaaaaatcaactatatgctgatcaattagtattctctttagtaatttttcagcaagtcaaagatgaaggctaatcttttatccaggaagacaccattaattatttatggaatatatagtgatatgaagatagtcttaggataatattaatgaatgcgaactacaaacataaatc

SEQ ID NO: 76816 - DNA, 274 bp, Oryza sativa
cgtagtcccgtgattatcgtatgagcatccaatgcctcatattgcctttgaagctcaggggacatagtagcaagcatgagacagcttatatcaagataatcattgcatcgcttttcatgctccctacgttgagcagcaggagcattgttggtcaagttagctggaaaaggctctgtaagcacaaactctttgtgctcttggtggcacgcgatttcgtgcagcaggaggggatcaactacgacgatgccttcgctctcgtgcacggatgggagtc

SEQ ID NO: 76817 - DNA, 353 bp, Oryza sativa
  unsure (1)..(353): unsure at all n locations
tttaccaaccgcctagaccatgaccacaatatataatcagcctaagccataatattggtcaataaaaatgcacacttacgtggcgaaaagcaatgatattgtatccaatcaattgcttaanaacccaaacagcaccttgacttatataaaaaagtcagcgggacagctatattaagcttttgtcacgcccggaaattaccagaatttccgaacttatttggcataaatcctcgtcaggaatcagccgagacacaaactgcaatttatataagatcataatactaagcgaataaactacttaaagactagtcttacatgaaaactgagcgaaataaattacaagtcggtcctcc

SEQ ID NO: 76818 - DNA, 243 bp, Oryza sativa
  unsure (1)..(243): unsure at all n locations
catctggcttatgttcttcatgtagcattcatatcgaatgactctatgaaattacgtcgatacttctacatattatgggtaacgtaggagacatccctattntcccccgggggtcttaattaccacagcttagctttcaattcgcctctgaccatcaaattaaatgtgaataacccgtcctcctctctttgaaacaaagggcgcttggccgacaccgagagcacgcggccgaagccgtcgtca

SEQ ID NO: 76819 - DNA, 441 bp, Oryza sativa
  unsure (1)..(441): unsure at all n locations
ngcttaggcaatctacaatatataagaatcatttttttcagcaacagtaaatggaaacaaactgcagcttctccttaggttacacttccacagaaatgacaatgttcagtactatcagctatctatagcaagagcaatatggtagcacacaagagttcccaattgatgtgatccagcttcataacggaattaaagttttaaggaaggtgcaaatcaagtactagaattttacagactttcatataaagaagctgcaacaataaaaagggttggagtgaaagtgcttactgttgttccaagtcccaatcttggttgatacttgatccttttctttgcagctgtctttcaactaaaatttatctagccaaaaaaaatggaagattgcagaggaacattatatattgctggagaaacaagtagcacacttactttcactttgta

SEQ ID NO: 76820 - DNA, 468 bp, Oryza sativa
  unsure (1)..(468): unsure at all n locations
agcttacgacaatgcgaacgaagatgatcaagtgctctacactcaaaacaacgattcgggtctcctcttttcctgttcctaacatttttcatagctcgagataatgtgttagataacaaaaccaagtcctcctcctcgaactgttcaagttgatcatcgaacatggcattaattaaagcaagaacagaagacttcgatgaagaagcaccaacatccaaagaagttgaagacgaaactaaagcactagacttagaatcacctttaagagaaagaatattcatctcatgagttttcagttntgtgtaaagcgaatccaaagtcaaagtagacatgttaacagactcctanatagacgtaactttcatctcccaaatagacatgtgaagaccattcaaaaagtgacgagaaatctcagattgtggataattagcatcataagaagaatcaacagatctaagatcactcaaa

SEQ ID NO: 76821 - DNA, 398 bp, Oryza sativa
  unsure (1)..(398): unsure at all n locations
aactaagctggcgccacatagagtgcagaccttcaagaaacactctgcgttttctcctggcgcgccacatgactgagcgtggtggctcctcaccgggagaccgcgcaggcctncctttgccggntcggccgggggccctgagtgagggtctaagctcctagcctgtggaaagatcgcgagagtggaaacacacaagacacgggcgatgtatacaggttcgggccgctgagaagcgtaataccctactcctgtggttcgttggatctgagtatgagaaagctacaaagtgcgagccacccctcgatcgttctgggattggttcctcttctctctaagtgggcaacgtcctcctcttatatctcaagggataccacatgcaccatctcttcctctctttc

SEQ ID NO: 76822 - DNA, 192 bp, Oryza sativa
catgcgagcttcacctgaaaagtatgtaataggaagttgtaaatccaccattgcttttgttcccacagagctaagcaacgtacttgcaattgatgctacatggttttcttccgaggaaatttgaatgctaagataaatcccccttatctttgaggggggggggggggattaatctcttaggtataaccctaa

SEQ ID NO: 76823 - DNA, 406 bp, Oryza sativa
  unsure (1)..(406): unsure at all n locations
tcatttgaatgaaagatgaatgactttttcaaatattaataaaaccaaagggctaatgaaagaattaatgatttttttaatagaagacggcaagagaattgcctgttatattaaaaagagaagaagggccttacatatacacaggagacaatgcaatatggatacactttaacaagagaagaaaaagaacattaacgcttaaggcggtttgaaagcaaattccctatctcgtatgtcatctaaaatgcacgctactgcacggctggtatttgggggtgtctgtttgaaaattttatcatttctcattaaccatatatgccaccaggttgtaattagggcactgcacgcagaaagaataatgatggatagcatatttttaccatctcattcgncaccccatcttttg

SEQ ID NO: 76824 - DNA, 354 bp, Oryza sativa
cctgcacctattatatcacagaacaaaccttgaatggtttaatctctttattgtgaaggatttattatcttatttcagttgaaaaataaatgttacccaaatagaaacggaaccagcatgtttgtcgttggaaaaagtggcaagcaaaagctcagaaaaaaaaacaaagtaccctcaattttcaacaaagatgctcacacaaatacatacatagtcaaagtaatccagcaaattcctacgagctcgcatcgcaataaacagcttcgaagatcatcaagaaatgctccaagaaaccgaaagggagaaggaaatgggcacgcactataggttcccttgcgggagccggagctggag

SEQ ID NO: 76825 - DNA, 494 bp, Oryza sativa
  unsure (1)..(494): unsure at all n locations
atcctctgagtcacctgcggcatcaagcttggttaatttatatgtggaaatgaaagtggaattgaccacttgatcatgagagtatgaaggatatctaacatgagtcacacgaatttgacaaagctcaatataatgtcaagcagtcatatgcatgataaggttcatcaatgatatacttgcatatggtcttggtaggcataagatgaagtcaattagaggattgagcttttaaaacaattttattttgaaaacaaattcccaagagtcataacaagagttgcaagaattcctttcatctcgaatcatctctcatatagcaattacttagatgcataaggttccctaaacatggatggttgttcacaaacacaagttcagctgggaataatgaatatacaagatcaatcacatgaagaatntcatgagttggaagttntatctttcatttatgcttgaaccaattgttttctgaatnttcagctctagtactatac

SEQ ID NO: 76826 - DNA, 414 bp, Oryza sativa
  unsure (1)..(414): unsure at all n locations
tctcgggttcttggtctctgcccgaggcattgaggccaaccccgagattattcgagctatcgagcggatgcgcccccccagcaaacttatggatgtgcaatgcgtcaccggttgcatggccgccctaagtcgtttcatatcaaggctgggagagaaggcgctacccttgtttaagctcctcaagtgctcggggccgtttacttggacggaggaagctgaacatgccctcactcagttaaaggcatatctcagctctcccccggttctagtcgccccggagccaaatgagcccctgctactttacttagcggcgaccccccaagtagttagtgcagcgttggttgtggagcgcgatgaanacaatcctcatttcgtgcacccccattctgtgctaacttggcccgggagcgagcg

SEQ ID NO: 76827 - DNA, 443 bp, Oryza sativa
  unsure (1)..(443): unsure at all n locations
agcttatctaaattacatatatgcactagattgcatctatattgggacggaggaagtacagtaagaaaatggccatgaccgttgcaaatatccctattttgatccagtaacagtcacagctatgcccgctcaattgacgaagtctattgtggttttcttgtaaaggcaaggtttgaagagtggtgaatttagaggtgatttacacaatcgtcgcgtgtgtggatttgtttacgttgaggtattattggaacaaaattaaaggatcggtgaaaacgaatttgaagaacaataatttatagaaagggagggaacaaccttgatggagcttccatgacgcaagtatgaaagcaaatgggtagttgntcgtgcagctgaacaagacctgagcttgcaagcctgcgaaaccaagcaacacttcgtttcatgtcttcttaaaaattaat

SEQ ID NO: 76828 - DNA, 476 bp, Oryza sativa
  unsure (1)..(476): unsure at all n locations
cttattagcatgctaagccttataaaaatagaggtctttttgattgctcattatttgcctactcttcgaataactaaggtaataccgtaaataataaagtattttgcctaccctctgcgaaaccaactacacagcaagcaagcatgactagtattctcaaataaaccaaaaaagaaaaacgaaaagatagcaaggatagtacacagtacaacacacaaccaacctcacagataattaattaacagagagctgataattaagcttgtgttattaagtacaataccattctttgctgatctttttctggaactgaaagtgccattatttttatgctgccaacttgcacatgatgcattgaactagatcttaaatatagctatgctaagcataacacaacaattagtttatatttgatctggttctccatcctcacttatacaacagattaggaggcaatngcatgtgatctacttgta

SEQ ID NO: 76829 - DNA, 409 bp, Oryza sativa
  unsure (1)..(409): unsure at all n locations
gcttgtggaacactntggccccagccatgactcctcgcacaatgctaactgtgtgtatagatatgatttgcgctgtcagaatttggaggacttaaggctggctcgagttataacagagccagaaggcccagaaactggactacgttttctgctgaggaagtgcaaggcgttagagagactatgcctggagtatgttaacggtgttattgacaaggacatgattgtgctatcccagagctgcaagaaccttaaaagcatctcactttggatgatacctggactctaccatgaacctgatggcatagttttcagaacggatcttacagatgaaagccttgaggctctaaccaacaactgtcctttgcttcaggatagtgagctcgcgtttacaggtgtngatcactgggag

SEQ ID NO: 76830 - DNA, 494 bp, Oryza sativa
  unsure (1)..(494): unsure at all n locations
acatagatactaagctttggaattggccatccacanagctcatgcatgcgatttcttcctgttgtgtcatctgctacggcgagagcttgtgccgtttgctacccacaatacgaaaggaaatccggtttatcgagtacaatggtttggtcttatattgtccgccttcatgcatttttgtgttttcctacaaatatttctggccttcatgcatactggattctgatttgtccatttgatcaactagaaaggaagcccgcgcagatgcgcgggcaatttatttttttgtttatagaaagaatactaaaataaaccatatgttaccgtatttattttaagaaccatagattaccttataatataaaataagaaaatattattatgtgaaataaattatagactctgatatactaattgtaatatctattatattcaaacaaatntcactttgtcatggctatacataaagtcgcatatcaccatctttcgtaacatac

SEQ ID NO: 76831 - DNA, 473 bp, Oryza sativa
  unsure (1)..(473): unsure at all n locations
gctttatgaaccgagctgtccggggagggtatgtcgttctgcggaagaagtgtgaaagggtatcattaacatcaggccggatcacatccggcctggtgtgctaatgcctgcaatgaatgatagtcgcgtcttatcatgccaccattataaaattatcgctgttttgcggtacgctatcgccaggttatgccagaatcataaaaaagcaggttgggagtcgtcagggtgcagcacgagacaaaaatggaaaaccagagctggttgaaaaaactcgcacgccgcctgnggcctggtcatgtcgttaatctctgctctatcgtggtattgcttttttccaccttgctcacctggcgtgaagtggtggtgctggaagatgcctatatcttcagccagcgtaatcatcttgaaaacgttgccaacgcgctcgataagcatttgcagtataacgtcgacaaactgattcttttacgtaa

SEQ ID NO: 76832 - DNA, 435 bp, Oryza sativa
  unsure (1)..(435): unsure at all n locations
agcttcctggctagcgaatgtgtctttgcattangtgatgctagtggntgcaacaacagaaaggagggtgcctttagatggcgtgttcgattcaaccgaacaatatcaatggcggtggcggcaagtcatcttctattgngcactccctcaaaggggagggagttgtaggcgaaagcctggctcgacatttttttaggactagcaacaatagcttgagcgtcacggtccccccttggggctggacattgtgaagcatctttctctccctccctaatggggctcttcatgtgaaaatcaagtccgaggtgtcttggccaggtggtggcgattctcttgacatcgtgacctctctagaagtattgtctactctctccgtcccaaaaaaagataaccctggtttccgtgcccaatgtttgaccgtcgtctaattgaaaa

SEQ ID NO: 76833 - DNA, 429 bp, Oryza sativa
actaagcttgcaccgaggtccgcgccaccgtgcccaccggcgaggtctatttgttaccctcgccgccgtcgagcggatgccgcttgtgaagtcagtggtgttggaggcgctgcgcatgaacccgccggtggagttccagtacggccacgcgcggcgcgacatggtggtcgagagccacgacgcggcgtacgatgtgcgcaagggggagatgctgttcggctaccagccgctcgccacccgcgacgagaaggtgttcgaccgcgccggcgagttcgtcgccgaccggttcgtcgccggcggcgccgccggcgaccggtcgctgctggagcacgtggtgtggtcgaacgggccggagacgagggcgccatctgatgggaacaagcagtgccccgggaaggacatggtggtggctgtggtgcggctgatggt

SEQ ID NO: 76834 - DNA, 454 bp, Oryza sativa
agcttgtattgtattcaacgttcaaaactgtccatgccttgaacttaacaccttcaatctgatagccgcactcttctgccatatctgttattgcatctaaattaaacaagtctgatagtgttcatgattcttacatgaattgaatcttatgactcgacatgtattcttatggtaatttggtgctcaatgcagttttaaattttccacttccactgggtcaaaccattctccctactccggaatccatgctgctaaattcatctgcaaacttcatgcaaggctttgattttcatgcggcacacatgcctgtaagagtaaacaaaggaaattaaagttggaaataggtgctgtgagatacacaagttgatatgctcttttgtaaaatgcagggtggacctgggccagtcacctatccccagaggcctggagcaactggttgtgatgtatgacagtc

SEQ ID NO: 76835 - DNA, 421 bp, Oryza sativa
cacttagaaactaagcttgccagctcccgctacgctggagaagctgtgcggcgttgatgtcctcgtcttcaacaccggccactggtggacccacaccggcaacctcagagcgtaagccactccgctccagagcgtttcctctctggctctctctctctccagcaaggcagtgaagccgagtgtgttactgcaggtgggaccatctggaggcggactggaagccggtcgagatgggaggcgaggaggcgttcaaccaggcacttgggacatgggcgagctgggtcgaccaaaacgtggactctgtcaggaccaaggtctttttccgaagcatcttctccgaacacaagaggtaaaagttaacttgcaccacccgcggcacccaagcacaatggacacctctgatgactgatctaacacctgc

SEQ ID NO: 76836 - DNA, 443 bp, Oryza sativa
  unsure (1)..(443): unsure at all n locations
agctnttcgccgattagtgcaatgggttccgtcaccggcatcgacgacctcgtcttcccacccgggcagacgtttcggttcggcagcctcgacttcgtcaccaacaacttcggcaagatttctctccttgactcggaatcagaccagtcgggagagaatcgacttccagtcccgtttggattcccaaacgcggctgaaagttacttcaagaccatctcgatcgagtcggcttcaaaccactcggccgagatcgcattttctccaacgacgccagatcaagatgatggggcttacccaccgatcctgatgaagctccccgacgatctagcggccgtcttcaccacgacagcgtcttcatcccgtaggcctaggcggaagtcggcttcaacaccgatttcgcctagcttcagggaagtcggcgtcatcctccaaccactcggcac

SEQ ID NO: 76837 - DNA, 362 bp, Oryza sativa
  unsure (1)..(362): unsure at all n locations
gattgtagcctcctttttcacctaccattntctgttacttcttttctcaaatgcattgcaatgtattagtgtttgtagaatttacatgaatataaatgacaccaactgtttttccatacatggaattgtatnttgcagccactaccttgacgagttggcatcttcttgtcacattttgctccctccatgtagcattatggatgaagttcttcgagcacaagcctttcgactcgagaactgtcatgggatntggagtgctcaatggcatctccattggcctcctcaacttgagtcttggtntaattctgttggattttaccaggtacaaggtttgcgatcttctttacgttgattcttgtacc

SEQ ID NO: 76838 - DNA, 374 bp, Oryza sativa
  unsure (1)..(374): unsure at all n locations
tcatgaacctagatcctcatgcactgtaagcgtacacgggttctaacaatgaaaggatttctggcgcacccgggaaggaaagactcacacatgcattaagttataattatgtttaaattctcacatggtagtcctactgatggcgacaccactgtagacacccgcctcgcggttctaccaatggctgccccaccgtagagcccctaccttacacatcaagaaaccactatgcatggatactgcctncgctcagctatctattccgctaggtctatacccatacgagaaatgcggttgtacggggagtgcgttcatgcttaacttcatggctcggtccttaattgaccaaggacgggactatgccttttcggaca

SEQ ID NO: 76839 - DNA, 272 bp, Oryza sativa
gagcttcaagccttcagttcctttccacaaggtccaaacgcagtagtccaacatcttccagaaccagggcttccacccacccgcatcacatgtttcgatcagctcctgatactatactaccaggggtcattcaccagggcgtctttttattcgagaaatcagaaacgtctatggcaacggaaacccaccgtcttcccgcccgttggaatctttgtatagcccgccaggtggttcagccttttaaccattatcagagtctaattatttatgca

SEQ ID NO: 76840 - DNA, 472 bp, Oryza sativa
  unsure (1)..(472): unsure at all n locations
agctntttgaccgtaggagtattttgtctttttaaagaatntttcgctctaatcgagtcaaaaataacctgcaacaaattacctatggttttataatgtgtggcaccgttcacttttgatgtgatgtttgatcattcatcttattaaaaaagaaatatgtaaatatcatttattttgttgtgacttattttatcatcaaagaaactatagtcttaacttatacttttacatgtgtataccaaatttatttattttaataaaacgaatggaccaatgttatatgaaaagtcaatggtgttattaaaaaacaaaggtaatagtaagttgtcatagggtaagtttatatatacctgagatctaaaatgcatctatagtgatattcgtctttattagttatctaaactaaaanggatattctttatagctaagctgtatacctatctttaagtaatggtatatacttatatcttca

SEQ ID NO: 76841 - DNA, 455 bp, Oryza sativa
  unsure (1)..(455): unsure at all n locations
cagcttgtagctgttgcccgtgttagttactcagatgtngcttatgggttgagcaattgtgcgaagaatgggccaattatggctgagtattagtgtcaatagacaatattcattggtgtcatccatggaagaatagaagggagtacatggaataagccaaagaccactggtgtcatgtgacaccattgctataacactagctccgcccctgcttgactgcttataaactatatatgtggcatcatcgacaactaaactataaatgtacgaatcataggtataagtctataatcctatctagactattgttctttagacttataagccagcttgtgagacataaaanaactaaacttaaactaacgagtatgtttacatatggctnttcaagctaaagccactctcacactgttaaaattaaaagtgacgctggagaagtattttattctcttatt

SEQ ID NO: 76842 - DNA, 469 bp, Oryza sativa
  unsure (1)..(469): unsure at all n locations
agctngactatagagtagtggaggccccccataatctctcatcactgcccctcttcagaggaacagcacaagggagcacaggtgctatgctactgctactccaattttctatgcacagccagcttcttgcacagcacaggacaaggtcctccatggcttctgctcctgcattttacatttttactaaccctgttaaggccttcgcaccaaacttctcccaaactcccaactttcatcacattacatcacatttaaaactttcctacttacataaactcccaacttttttttccaaactaccaacttttcccaaacttcttcccaatttcagaaactaaacataacccctttgaattggaggataaatagaggaaaagcaaaggaattgaaaccctacactattcatgtctntgatttgtaggaagagaaaagaaaaaacgtanganactttcctattcccacgaatcta

SEQ ID NO: 76843 - DNA, 443 bp, Oryza sativa
actcagaggagggggagaactcccctaactgttggtatatggcccggtcaacaatgctctacgttatatctctcgtggagctatagataaactatatcaacccgatttagctcattctcaaaaagaaagcgagtatgctctagtgatatttaaaaaataaactataagggttgagtgagactccagtcgtttcatagctccacatcaaaatctacttttggatttagatttaagagttgaagccttgccaacgtgcctcaagaatggcaataactctgacccgtatgttctatgctcatgattggcctgatgcctgaataaatggtgtgcccgtttctcgtactactactcgctatctcaacacttcagggaaaattttcgctttacatggtacgcctatgaatgccttctgtaatttagaccataccattcgtgcgacttgt

SEQ ID NO: 76844 - DNA, 457 bp, Oryza sativa
agcttgtataacaaaaatcaaggcccaccttgtcactaatggatctccatccccatcaaggcccacctcggcactaatggatctccatcccctgttatgtgtaatactgtatttctgatatcctaaagtggtcttggtgaaggttgatgattgctttcactagtctcgttgtttctctgtttactgaatcatactaagatatgactgacatttaatagttgaaataagcttaggcttttagacctttcttccattatgtgtattgcatgcattattaatgtattaatattaaattctttttatgataacatccatgtttagtgacacttaataaagaatcacggagaaatttaaccctactggatttctcctatgtatcatgaccaaatacgaaccatatcctgtgccataatatttctaatgaaaattatatagtaaggataaaacttgtcatata

SEQ ID NO: 76845 - DNA, 461 bp, Oryza sativa
agcttgataaacaaaaatcaaggcccaccttggcactaatggatctccatccccatcaaggcccacctcggcactaatggatctccatcccctgttatgtgtagtactgtatttctgatttcctaaagtggtcttggtgaaggttgatgattgctttcactagtctcgttgtttctctgtttactgaatcatactaagatatgactgacatttaatagttgaaataagcttaggcttttagacctttcttccattatgtgtattgtatgcattattaatgtattaatattaaattctttttatgataacatccatgtttagtgacacttaaaaaagaatcacggagaaatttaaccctactggatttcctcctatgtatcatgaccaaataacgaaccattatctgtgccataaatatttctaatgaaaaataatatagtaaggataaaaattgtcatata

SEQ ID NO: 76846 - DNA, 376 bp, Oryza sativa
  unsure (1)..(376): unsure at all n locations
taaccgacaagacgaacagaataactgagatgggtnacttaaagggacttaacagaatttgagagaagggacaaaacaatgtcctaacaaaagacctatccaacctaaggacctgcaggacgcaaagcttaattctcttcattggcagaattggaaacagaagccaaaagcttatcctgtgtcacatcccgaggagcaacaccacaaagatcagttgcaattttctgaagcagagcgacagggcaatcagcagtcttctcagtttcagttgaaacatcagcaaattcagtttcctggagagtgctcccaggaaaaagcaaaccgacctcattagcaacctgcttgagcttcttcacagatttccctctgggaaatt

SEQ ID NO: 76847 - DNA, 474 bp, Oryza sativa
  unsure (1)..(474): unsure at all n locations
agcttagtatgtactactaaatgttatgcattgcatatgaataaaaaacaattaaaagtgtattttaagacaaggctgagaccattatggtcatatcactaggaatgggcctaggaaaagaactagtaaatgataacctcaagtcatgcacccttgccaaaaatgaaaagaaaccatatctgctccaatagttacatttaaataaaccacatgaacttttagatcaacaaacaagaatatgtcatactcaaggtgccggcgctacaagattatagtattagtattataagtataacagaggcatacatcatgacaaatgtacattagtggaaatttagaaaatatacaaaacacatagattcagatccttcaaaatcctcatacgcttaaacaagatgttgttngaagtcccaccaaaattatgccagggttgaaattgcactaatttgtgttatntaatactcaagtttttag

SEQ ID NO: 76848 - DNA, 340 bp, Oryza sativa
tgatggacacatattgcactcagaggaaagataattctttgtgaacatcatttttaattgcagacaagcatgagaagatgattagagatcacccaacatggagtatctagaatatgatttctactcggtctgaagaaatgtgtgctaatgatcaaagttctcactgtataagagcagaggcacatgttctatagaaactttatgatgcaacaaggtgtgagtattcaaggatatttgactaccaacttgatctactaagaagtaacccaggcaatacagtagtagtcgctcttgatagtgatagttcaacttatgtgttccacagaatcttcgtttgcct

SEQ ID NO: 76849 - DNA, 469 bp, Oryza sativa
  unsure (1)..(469): unsure at all n locations
agcttatctttctcaaacttcatatcttttaagcccataactagatcacgttttgaaaatgtgctcaattgattcatgccaacatgggctagccttctatgccaaagccaacccaaagaagattttgcaactaaacaagttttcaaatttgcttcactagaatngaaatcaaccaaataaagatttccatatctaaaacctttgaacacacaagacttgtcaagaaggctagaaacaataacttcttgcgggaagaaagcacatgacaagctaagatcacaaatttgagcaaccgaaagcaaattgaaatttagagatttaacaagagagacattatcaattgacaaatcattggagatagcaattttacctaacccaattacctttcctttgctattggctccaaatgtcactttctcttgttcattccttcctacctcaaatgtggtgaacatagccctatcaccgg

SEQ ID NO: 76850 - DNA, 467 bp, Oryza sativa
  unsure (1)..(467): unsure at all n locations
atgcagctttctaaatgctttttttaatgaaaaaaatatgatgctattgactttcaaaggtatgcgcggatatggaagacaaagcggcaaaatgaagtctctaatctcactatttttagttatgaaccttcatggatgagaatatacttttttttttaattntaaatgcataaaaaaccctaaaaatattctaaatattaggatattcacattttntaaatttcaatgggatgagagtcatccattttttttaattttaagtgcatcaagaagccctaaaaatattctaaattctaaatattactagcatattcaaaccatggtcacacatacgtcactagatagaagtttatgattcttcaagtgatatgtgcatgcatgccatatgtggatntgaaactaagatctctcaacacatacaaaccaatcttaccagctcacctatagaccatataggtgatcacatg

SEQ ID NO: 76851 - DNA, 427 bp, Oryza sativa
  unsure (1)..(427): unsure at all n locations
aactataaaactaagctttcgacaggatatntctgcctaaccgccctcaaagactcttgcgttatggtacaaccgtgtnaancttgtcaatttcatagcaaacacacaaagctaccagcgcaagcactgcaaaccatccctctcacttggccgttctcgtgctgggggctcgacatactctgtccattcccacgaggacagggcggttacaaaatcttgttcatggcaatcgacaaattcaccaaatggatcgaggcaacacccaccggggaaatcaatgccgacaaaaccatcaaattcattaaggggatattgtgcagatatggattgcctcaacgcatcataacggatagcggcttccaattcattaacgccgattccaagatactacattggactgggagcaagaatgctttcctccgttctc

SEQ ID NO: 76852 - DNA, 157 bp, Oryza sativa
ttaatttctaaaaagtaaaattgtcgatgaaatttctttggattggcgaacgcaaaaaaaatgtatttcttatgaatggaaagcttggccatggtatttttcttgaatttcccaaataagtaataatattgtctccggtattaacccccgaacgtca

SEQ ID NO: 76853 - DNA, 470 bp, Oryza sativa
ggtatgcgggacacatgctccctggtctctattgtctccacgactctgagagcttgagctaaagctcttcttgtgggtgctaatcaatttcaaattctaattgtcggatgctcacgccgagtccggtcacgagaaccctaacctgcaacgccggtcactctcactttccggcgtcagatttgccacacagatgatttgacagtctcgccaattcgccgtacgtgtttcgctttcgagctagccgcgtcgttggggtcatgcaccgccccacgcattgaccgatcgatcgatcggtcgcgtaccgactgggacaccggtgtcatccacgtagatcgtagacgcattccccacacctgggtgcacgtgcaccactgcacgtactacgcgcgaacaatcgaaccatacaatttaccggtgagtgtgacatggccgtgctccgtgcaccggtccacgaccgatcaacacaacgc

SEQ ID NO: 76854 - DNA, 419 bp, Oryza sativa
  unsure (1)..(419): unsure at all n locations
agctgatgtgttctgtgtcggatattattgtaaaaagtctgtcccctaactgtaacgaagcggcagatgctgtgggcctgttttaactgcctgttcatatttctatgtttcaagtggcatcgatgttcgactttattcgattaatggttccacttgcaaactgtgctacgaaatgctgacggagtgcaatcttgtcataccaggcgcgcactgcctccgtagtaagatattttactgtagaaatttatgtggaattatccgatgttttacgtcctttagaaatttgcgtgcaattgggacgacgttttgcattgaatntgttgatactaacaccaaactcaaattatgacgtttctacgggatcaaaatgtgattagcctaacatgctatttctactcgagttctgccgcaggatgtac

SEQ ID NO: 76855 - DNA, 470 bp, Oryza sativa
ggatgactgttaagtgctggctatattgtgaataggttcattggtatgctcggatgcacaaatgaagattgccctgcagcactccaataatttggaacttgacattggcccaaaggatgctgctgtaatgacgcataactttcatagtgtgacgcatcaatgatcttcttggctgcagaaaaataatattcagatcagccagaccagtattaagtatcaatgcatcaaaaattactatcttaaagttgtggcaagacttacagtttggactaaagatctccaaattacagtgtgtttgctccttgggagagaagacaaccgaattggtattcatctccagctgtacaaatagcatcaagatgatcaagcatggatgggatatacacatacatttatacagaagaataaaccagggggataacgtagatggtcttacagcatcaagggcttcctatgtctcactggcactt

SEQ ID NO: 76856 - DNA, 459 bp, Oryza sativa
  unsure (1)..(459): unsure at all n locations
agctnntttgttgcgttcaatggaagatggtctggtagctgatggagttatagcacaagatattagccaagcctctaatttttggagaattcgtgaggtgatcatatgtttagccttatgtgtaatttttctctttagttgaagcatctaataaacaaatgaaaccttacgtccttaccaccttgtaatgcaggtccaaagttagttgtatcaaatgtcctcaccttttaagattgctcgtgtaatcagtctaataatgggcaaaaatcattgaaattagtatgtctttgttgtagggtatatcagaagcatccgtcaaagttggggctgtctacaagtatgacttgtccatacccgtagagaagctatatgatatttgtgaagaaatgcgcagccgtgttggtaattgtctacttggttgtgccattaatagtggataagctactggatacctttctt

SEQ ID NO: 76857 - DNA, 343 bp, Oryza sativa
  unsure (1)..(343): unsure at all n locations
tcagccactcttctcanatacagatcatattgctccgcagagaaaccatatgacgaacgatgcgacaactgcgactctcgagagattacatcctgctctcgtgacccttgaggccacccgataccagctgcgcgcaagctaaaagcttgccagggagattgtacatgatctgagagaacagaacgccgagctgcaagactccaacattgagcaggataggccgtctaaaggtaattctcatccctgcctcacttatgcacgctgcgatactggtgagtctaccaacaagaagcgaacagtgcaagctcgcagatatctgaactggaaaacagatccacctcac

SEQ ID NO: 76858 - DNA, 440 bp, Oryza sativa
agcttgcacaaggccacaagcttatgaaatgcataccaaattcatctcaacacattttagaataaactcacattccacataatcaccaacttattctctactgtaaagagaaataaaataatatacttactttatacctaatgcctctaaaactattatctttaaaataacttttaaaataactagttttacataagctgaactttagaagtttatataaaattcatcttaaatcctttttagtaaacccaagttaccaaaacatatacttccgagttataaaataaaattatatacttactgtgtgatagaagcctctaaatttatgtaagtaataaccaacatagagaaacctttaattcgtaaaaattgtagaaaattcatctttagtccaaatggagtgaaccaaatttccatagaaccagcaagtaatatacctc

SEQ ID NO: 76859 - DNA, 473 bp, Oryza sativa
  unsure (1)..(473): unsure at all n locations
agctngagcgacgacgacgagcccgacgaccaccgtggctcatggataagcctgtggtgcggaggaactcgacggcttggaagagctcgccagcggtagatctggtctatcatcggtgtggatgagctcgccggaggtagtctattctctacctggtaggccctcctctccctctccttcgccgtttctctttcttcttaggaccaagcacgtcgcggggatctggactcccccaacgcgtggccctgactgtggctctgagccgaggcgcatcgaggaaactgtaacctctgcaggtcacgtccggtgttacaagaccatggtccccactatcacgggcgctcgaatccaacgtggagagccaagaccacgcttcacggttgagcgttgtatatggtcttacttaccattctctaacgtgagcaggtgtcatatggccctgctagacgtgggtccacatatcagttacttat

SEQ ID NO: 76860 - DNA, 434 bp, Oryza sativa
  unsure (1)..(434): unsure at all n locations
ntatatgtttattgggtggatatggcatgctcgcatgctatctacgatttaaaacgtactaatagttgctatatatgcttaaatgtgaagctttagctattcagtgagttataactatatatccagaagataaagattaagatgatagactcacagtgtgtgtatactactactccttcctctcaacaaggaatacaaccatagtatttgtatatcaaattagtagagcaaaatgatctaagtgtttctacttaaataaggggtggttaggattaggaggatcgttgaagtaagatgagaaatttaaataaacgttaattggttggataaatagcacaatatgagtttattcttttaagccagagcttaactctaggattatatatatctgtagttggatggaggcaggaccatatgtgaatactagatatctt

SEQ ID NO: 76861 - DNA, 439 bp, Oryza sativa
agcttcgatcgtttaactggcatctatgtttaagtaggctcaaggatagaatcacttacttattagtagtaactaacaaactaaccatggtaatttgcacagtaaaacaacaacggtcaagactaggatcgccgagaaagctaacatgcaagagcgagtagtgcagccttatatgagttctgaagattaggaaatttggactcgaccaagggaatgaaatcccccctcccccccccctcccccaaacattttcccggtcaagcaaacgtcttactaaatgtttttggaattttccacctttgtataatttcaatcgaaataagtttgagatttcaaataaaaacttctaaaattcacaaaatcttggtgtgtttcataagtgggaacccttgtcataacggtaggaaacgataaaggaacttatatggggaagcctttt

SEQ ID NO: 76862 - DNA, 464 bp, Oryza sativa
  unsure (1)..(464): unsure at all n locations
agtacctacacagctaagcggacgattcattctcagcttagcggtctattcattctgattgaattagcagcttaagggtgtgtctagttcgcgaaaagaaaaatttttaggtgtcacatcggacgtttaaccggatgtcggaaggggttttcggacacgaatgaaaaaattaatttcataactcgcctggaaatcgcgagacgaatttattaaacctaattaatccgtcattagcatatgtgggttattgtagtacttatggctaatgatggactaattaggctcagaanatccgtctcgtgatttccatacaaactgtgcaattagntnttctttttatgtatatttaatgctccatgcatgtgttcaaagattcgattatgacgttttntgagaaaaaaattttgggaattatacaaggcctaaaggtgaacagtttttgtactaagaacatacacaatagc

SEQ ID NO: 76863 - DNA, 459 bp, Oryza sativa
  unsure (1)..(459): unsure at all n locations
agctnttccaaagcagttaccgttcaagcacatgattgtgtacaattattattgcttcctactgaccggtctcagaattcactcatatcagaattcatctgccctttcaatcattctcctttgcacgtacctgacaaagcaaaactttgtttcttttgtgcaaacactttttttttgtgtagcacattcctagctgatcaggtatggtcaggtactcaaaacggaaataaactagcattacttggttggctagaagaggcatatccctgagcaatctgtaccgaatttgcattgctttgtgccacatgcatcctcttccgtgcatatgaagtttgagatatgttaatctagacactgaaagcaagtttctttgtccatgaatgcatccaataggtangcatgtgaaagtatacaaacatgtacacaagcacatgtaccaacccaatataatggtctata

SEQ ID NO: 76864 - DNA, 461 bp, Oryza sativa
  unsure (1)..(461): unsure at all n locations
tcagaatcccaaatgcataccgctcgtccaataatcaatctctcaagcatataccctataatgctctcttctagagctagcctagacaagtgctccattccatgaccatgtagatgtagctagccttatctgctcaacaacacccatcccattcaattgtccaccgtctttagctcttgttaaacctatctttttcagatagatcaaaaggggagctacgcatgcaagaatcatgttgcgacagtaatggtcgccatggccttcgattcctatatcataaaatcatttctatggatcaagtggtgtcgccaatttctacgatgataatgggtcggctggtaaagntgggaatcatgcatatacatcagactatcagagtgttcagctatccgcactgatgagctgtatgctgttctttttctttcagcctccaactgatatattgtactacgtatattaat

SEQ ID NO: 76865 - DNA, 401 bp, Oryza sativa
agcttcgcgttcttgccttaccaggaaccctttttggttccaaccgaccccgccccggcgttcccaactattggcatgcgaggtttccctgaaccgactagctacttagccagggtgtcccattccaccttgtggttgcactttgattatgttcgatgagtttcccacaggaatcggtccttatatgcgaatacgggacagtgccacataggcacaacccccgcatcgcgagttttcacaattcattttattttcaaacacaccgacaccacatgtcgggttttgaaggcttcacaaacccatttcccaagttttcgacaagcaatggtgtatgtgggatatttggtatacgcgctcagagagcacgaataccgaggtaccacaagggtggagcgactagg

SEQ ID NO: 76866 - DNA, 401 bp, Oryza sativa
  unsure (1)..(401): unsure at all n locations
tctgcttcttctatgcgcagcttctgttaatcgntagcatgcattatgtccgcatgattgattgcactctgagaaaagtagaaaaaagggtattcttttcagaaacaaaaattgatccaaattatttgtgttagagatcataatttttttttcttacatgaatccctgagcacaaaaaagactcttcaaaatgttggatacttcgtccataccaggatgagctcagctcagtctcagaggttgtcggcgcagccaaagctgcacatagctgatcttattgcttcatttggaatcccggtattgacatcttcagacaattggctgaaaatatttgatgtttcagttcaatcattattgtcattgtcttgcagcgtgaacaaatccttcacatctctagcttt

SEQ ID NO: 76867 - DNA, 438 bp, Oryza sativa
agcttcgcattgcgccttacagataagatctatcgcttcttacaattgacttttgataaattttaactgacaattggattatacggtcaaaagtgcatttgaattgttattctatcgcagtttctcccatctaagctgataagatcgatgtccacgtaattttagacagtaagcaatcaattgaggcataagaatatgtacaagacgaaatgaatagcatcaagaaattttcaaaatcgttttttaagtactatagggtactgttattaaaatgttgagacattcaaaagtacgtacaagcctcttcggtcaaaaaaagaagaagaaggacaagccttccaattggtagtttcatgaaaaatagttctagattggaaaattcaagatactcagttggggagcattattgtattttatgattataacttaaaatctgat

SEQ ID NO: 76868 - DNA, 438 bp, Oryza sativa
  unsure (1)..(438): unsure at all n locations
tctctacggctcgatgcgggtcaagtcgtacgactgggctatcgctctctcgtgctcgggcccaaggaagagtaagcatttgtctcagctgcatgcgaatgcatgcgcctgtttgccgtcgattcgctcgctgatgatcaatcgacaaaaaaactcgatcgttttctgatgtcaagttgtcaactgcatctaacatttgttccttgtctcacctacatatactagtttgaggttacctggctatgatcaaggacagaaaaaggtctctgataatttacaagcacgatgagattaatacctccctacaaaatcctttgtaaagacggtttcagatagccaaatcccaccgatgtctcaccaaaccagcatnttttttcagcaatatatacaggagaacctatctctccctgtccactgctctactcttgtatacagttt

SEQ ID NO: 76869 - DNA, 463 bp, Oryza sativa
agcttcttcgctgcacctcggtgtcggcgtgtccctttctgaccaacggaggagtgactaccactagcctcctcctcctggttcccctccacatacctttccacgtgcccctgctggttcccctccgcatccctctccacgttcccttcctcgttcaagtactggtttggatcctcgttcccctcttcttcattccagtactggctgcttccctccgcgattgtatcgcacaatatctgctcctcatcgcggtcagccatctgttgatacaagaaacatctggtcacacgacatttatgttttaacaatctaagacatgtatgctaagtgtaaatgtcgtacattagaaccctacacaaccttacgtgctaagtctaattacaaatcgtgatataagctacgtctaggtgacgtatattatacaaccctagctcgtaaatatgtatatactaagtctaattac

SEQ ID NO: 76870 - DNA, 444 bp, Oryza sativa
tgtcaatttcacagcaaacacacaaggctactatcgcattttctacaaaccatccctctcacttggccgctctcgtgttgggggcttgacttactcggtccgttcccacgaggacagggcggctacaaattcctgttcatggctatcgacaaattcaccaaatggattgaggcaacacccacagggcaaatcaaggccgacaacgccatcaagttcattaaggggatattttgccgatttggatggcctcaccgcatcgtaacggataacggctcccaattcatcagcgctgatttcgaagactactgcatcggactgggagtcaagatatgcttcgtttcggtttctcacctcagagtaacgggcagctcgagagagcaaactgtatagtactacaaggtatcaagagtcgtgtctacgacaggctcatgtcacatgacaaga

SEQ ID NO: 76871 - DNA, 394 bp, Oryza sativa
ccgaccccgccccggcttttccaactattggcatgcgaggtttccctgaaccgactatttacttatccagggtgctccattccaccttgtgggtgcactttgattatgttcgatgagattcctacaggaatcggtccttatatgccaatacgggacagtgccacgtatgcacaaaccccgcatcgcgagttttcgcagcttattttattttcaaacccaccgacgccacatgtcgggttttcaaggcttctcaaacccatttcccaaattttcgacatcaacggtgtatgtgggatattcggtatacacgctcagagagcacggataccgatgtaccacaagggtggagcgacaaggaattatggtatacaacctacatgattagtgcgctact

SEQ ID NO: 76872 - DNA, 338 bp, Oryza sativa
ggtaagccaagcaaaagcacttcgcgtcgtcttgttgtatgcaccatcttacgtggtggaaaatatgttgcacaacttttcaaatcttattcatttgcgctacttaaggattaataagggatattttccagaaatgagtctacccaataccatttcaagattttatcacttaaggatccttgatttacaacaatgcatgggtcactttgggttaccaagagacatgaataatcttgtaaggtaccgcattttcttgtcccataccataatctccactccgacattactagtgtgggaaaagctgaatgttacaacaactaatgagatttgaagtcaaa

SEQ ID NO: 76873 - DNA, 462 bp, Oryza sativa
  unsure (1)..(462): unsure at all n locations
agcttggatgggctgtaccacattaaaattactagcggtttcagcccattccgtcggaaaaatacttgtactcacaatccacagtattaaatgacatggatgtatatacaaatatagacagcacacacaaaaattattgtgaaatgttatgcgtgtcacgacgcaataaaaaaggtgtaccgtatagaatatatcctgggacaccgatagtccctttgataaaaaaaaatgaggtgcacgataatatgtacatacacatctcaaaatacattatactcatatgtatgaaaaattaaattggactgcccatttaaatatactgcaaaataatcacgacatgcactccataaaaagcgcgacatgattgcaaaataaactattttattattgcacaaaaaaaagttctcacgtgacatgaatcacattgtactggctttaaaatggnggaattcgataatgggg

SEQ ID NO: 76874 - DNA, 484 bp, Oryza sativa
  unsure (1)..(484): unsure at all n locations
tgtattagagagacatactcatggggtatgtaataatgtgtgacaacgaaacgggcatatgtagacaaagggcttgcccaatgaaattattggtaaggagctttaaatcactagagaagtatggttcaattttcagtagcatcggaaaaaaaatccaaaaaggaactcccatcatacagcacatcggctttgcaagaaagccaatggacgaaacaaattaaagtctgacaattaacatctccgattgaaagatatattgcaaattctttgctggataatactccatataagaatgttttctaagggtcagcgttatacgggtattcccaaattacgcttctgttcaatgtatcatattttttttctagctatagtatacattatccttgtactacgagagatggctctttgtgcttccctancagaaaccagtgatcaagtagcttatgaaatatgctcaatgatgcccccttgcatgtacata

SEQ ID NO: 76875 - DNA, 391 bp, Oryza sativa
agcttatctaatgtcagtacatgtttatgttattattgtgagcttttgttcatattattatttgtgttaatcgttagaaattaatacagcaatttttgaagcttaattaataatgtaaactagcatgagatcatcgtatagagtaatgttttaatttgtgtctcggttttacttaacgaaaagtgtcccaacaaccaacaatataagaaagcctacaaaattatcatctcgatctgcgacagttaaaattaaatgacctctatatcgtttatacaaaaagtaaaggagatcagtgtacacactttgttgtttaactaccaatttgttttaccttcatataaaaaataatggattaatctgtcaataaaggcatcattgcatggcctgattt

SEQ ID NO: 76876 - DNA, 448 bp, Oryza sativa
  unsure (1)..(448): unsure at all n locations
ctataaaactaagcttcagggaaggctggntaatttagcaatcaattttgtttttcagattttcaacaatctaagtgtgtgccttccacaaccagagcgagacaagtctcagctcggtcggggtgagaagtaacaaatttacttatcaagatctttcaaatctggatttctccaaaccaaaccaacttttccaaacttcccgataatagtggtccccaaacgaccaatcactttcagggactcccggtcccgctgtctcccggacagctaattgctttccaagcattaggttatcctaaccttaacaccttttcataaaacagggtaaaacaaaaactacgctaaggaatcacctcacatctgcccatgaccgtgggcacggcttgtcaaacagtttggtaacctctgcaaagggggtacactttacncacacgacattactaacccg

SEQ ID NO: 76877 - DNA, 413 bp, Oryza sativa
  unsure (1)..(413): unsure at all n locations
agctntactaaggccagcaagagaagtgggtatgacaccactttccatcaaaccttcaaaaagttgatatgttccacacagaaactatgcatatgctaaattgtcaccacgcatggaggtctttagcattttaatgttaggtttttccctaccagtgtttgtcctagcacttgttccctgattggaccattcagttttctaatatgcagcccaacaactgacaactaagtgcaaccaggcaatgaatacaatggtcgacaggagcatgttcagcagtttttactaatgggtggaacaggaagctaaaaactagtacaacaattgaagtatcatatgcatgagcaatgaaaggacaccgattacctttggggcttgcatttctggggaaacacccncaccacagtattgcaata

SEQ ID NO: 76878 - DNA, 460 bp, Oryza sativa
  unsure (1)..(460): unsure at all n locations
agctggcgcacacgaaataagacgagggcttataanaacccacgcgcgccccctacctggcgcgccagatgacggagcgtggggctcctcaccgggagaccgcgcaggcccccctttgccggttcggccgggggcgctaagtgaggttcttcgccctcgatcggtctggggaatgtttcgcgagagagtaaatgcgcaagacacgggcgatgtaaacaggttcgggccgctgagaagcgtaataccctactcctgtgttctggtggatctgtgtatgaaggagttacaaagagttggagagcaagagagttcccactctatagcccctctcactcctcttttctccagtctacttgctcaggtctcctctagtctntttttccgtccctcctttgttttggtccgccctcttcgtaggcatggtccttcttttatatctcaaggggataccacatacacc

SEQ ID NO: 76879 - DNA, 454 bp, Oryza sativa
  unsure (1)..(454): unsure at all n locations
agcttcatgataactcagtcccttagatgttctttgaatcaagcgatcattcccgcaagaatcattacaggtctgtaaggactcatcactgttgccatgcagtaattcacaagcttcgaataaataaagatcatccattaaaaccaatgaccaaagatggaaatacaaagcatactattactcagtcccttagatgttctttgatcaagcgatcgtatccgcaagaatcattacaggtctgttagggctaatcaccgtcaaatgaacatggtaagatggcatgaaagtaaaaaagccatgaagtaccatgtcccatgggaaatctccaggggcgcaagaaaagggaagcctatgtatgataatatttccaggggcgcaagaaaagggaagcctatgtatgataatacaacatgatagtactccctccgtttcacaatgtaagactntctagcat

SEQ ID NO: 76880 - DNA, 485 bp, Oryza sativa
  unsure (1)..(485): unsure at all n locations
tgngagaggcaaaagagaagacaaagatggtgagaagactaacgacaacaagcccaacaacaacaagtcgaagggttcatcccaagggaggaagctggataatctcangaaggcttttcaacaagtttgcgccgccttcgagccactaagtgatgtagatggtgaaagtagagatgatgataagggaaagaacatatctgatgtttgcttcatggcgcatggtgaatctgacacagagtatgaagataatgaggtgagtgcttttgaggaagctattaatattttgagtgcaaaaaataagaagtgtgagaagatgtatagaaaacaggaatttatcattgaatctcttaaatctaaaattgataggttaaaatctcttattcctaatgatgatgattgctcanattgtgagggtttaatgaatgagattccaaaaattagagatgttaatgctgcacatgatntgaaaaatatatcttctcttg

SEQ ID NO: 76881 - DNA, 455 bp, Oryza sativa
  unsure (1)..(455): unsure at all n locations
agcttcacataaagtctgctattcttatagataaaatctaataatatgagcaacagtatttaaagaaaatgataactctactaatggcccttgttttgaaaggaatattgctaccgtcgtatttgaaccatctagatcatgtatttcctggttatccagacaatcttcaaaagagaaaaggcccttctcttttgttggttgttaacttggtagtagaattttatgcatatttatccttgctactgttgatgacttctcaggttcggtcttcgtatcgtgcgggagagctctntgtgcaaaatttggtcagacgtaaaaaagccgagcttgcacctactttgcagtaaccaaataggagtattactactatacatctgatggcctggtgcagttctttgatgaaaagtttgcattgaagttgtgtgctgatgacangagtaaggaggtggcacaat

SEQ ID NO: 76882 - DNA, 492 bp, Oryza sativa
  unsure (1)..(492): unsure at all n locations
tcgattntaagcagtataagacaagcagagtactcactgttaatcctaaagtttgtattgcatacaactattggtgcaatttgagaggttcacaaaactagccaacgtttctctgagttgcttctttcctccaaatacaaatgctacatgttgcaattggaatacatatgtatcgcgaaatataagatataactctctttgaaacaaatacagcttatgaattcatgcagatcatgcaatatactaatttacaaccaaaaaaaaaaaagatccaggctgaaacagctgttgccagccgaatacgttttggtttttcacacctcagaagatgctattatcagcanatatgcaagaaagcaaaatttcagcgcatgctgagagctactggcatgcaactaaattaatagtagcacgcacagcacttgaaatatcagcgatgtcttgaaaaaaggcggcaatctaaatggtaatcttgcttcttgactacaaagg

SEQ ID NO: 76883 - DNA, 464 bp, Oryza sativa
  unsure (1)..(464): unsure at all n locations
agctcttaatatctatctatgatcctgtatttcaattgttgntacttttggtgacaacaagtatcttgacatacttaatttcaggggatgcaaacaacgttcaaattggatctgggaccaatatacaagacaattctcttgtccatgtggcaaaatctaatcttagtggaaaagtctttccaaccatcattggggataacgtcacagtaggtaaatatgatccgtggttcttgccttacacatgtgcttcttatgatttgtttatccaatattctcgcaatatttaggttccatattttaaatggtcacgatctgtttctatcattgcctagcacaagaataggcatgagcacatcttcctgcanagatgttactcatgaaaacaatcattgtgaagttctgatgacatatacattctgaaataccacttcacacgtcatagtgctgattacaaggatgtactg

SEQ ID NO: 76884 - DNA, 445 bp, Oryza sativa
  unsure (1)..(445): unsure at all n locations
tgagctgtcttgtggaaagaaaaaaaaaaggaanaatctctcgtgatgcgtacagctaccaactgtagcaggtacatgcacctgattcagttgagcaccagtacactgcatactcactcctagtataggatcatatcatattcataggagagagtcatatgaaaacacactgagtaataaaatcataggactataaataagtatatatacttctacataaactactccggagatagatagccatgcatgcaagcagcattacctgctgctggttgcctctggctcctcaatcctgacgccccggggttccgtctccggctgagaaattatgctagccgacaagagctcgccatactccctcgtagctcaacatggcttatgtttaatgccccttgcatctctccctgcagcgcatacacatgcccggcttccgagaaagaagtca

SEQ ID NO: 76885 - DNA, 401 bp, Oryza sativa
  unsure (1)..(401): unsure at all n locations
agctntagtctttctcaagtgctcgatcggtgcttttctggtgatttctatataagaaaacacttttgagaacttggcatagagtcggtgatcctactttcatagggcccatcctagcccgccctaggtcctgtcgtgcccgggccaagatttgtcgggccggcacgacccgacctacacgtcggctcatgcagtgctggcccacgtgctccaccaggccggcacgaaggcacgagcagcccatcgtgtttttttttgaaataagtctatttaccctccatctctttcggctgtgacatatatatagctaanataagtctattttgcgtccctactctttgggccgnngccatataatatgctattngntctctctattctntgggccctgcttacctatg

SEQ ID NO: 76886 - DNA, 458 bp, Oryza sativa
tgcttgggagggcaaaccccgtgatgtggagacttgtgttctcatgtgaggggtggacaagccagatcaatcaattgtgaatgtagcgtatacacctacaccacagagagatttgctgtgtcagcaagagcaaaacaacagttaagcattggggatcctaaagcacctagaagacaatcaacatcggctaaaacaaatcctccttgtaattaatatgatcagctaatcacccaaaagagcgtcaaatttccatacacaattgacaataatcgccccccccccaaataaaaaaaaaaaaagaaccgagcgcattgcttctgtaatcacaatatttgtgcaggagaaggcacccacattagcagttgaaactatatcgttggggcatataaattctaatatacaagcgtgagataaaaaaattgatagaacatgacacgatgaaactcgcacaatggcca

SEQ ID NO: 76887 - DNA, 332 bp, Oryza sativa
  unsure (1)..(332): unsure at all n locations
cacagacaagaagtgtactatactgagggtgtgtttacttcacgctaaaattaaaagtttggttcacattggaatgatgtaacaaaaaaagttaaaattatatgtgtgtaagaaagttttgatatgataaaaaaattgaaagtttgaaaaaaaaaactttgtatctaaactcggccttagtcctacggtcctaccaggcctgagaacagaggtcggagtattaatgtaccggattggacttantacgctgctatcattttcttttcaaagaaaaaaagaaaagagagtattctcgtagacaaaatggtaaggctcacactttaatattgtta

SEQ ID NO: 76888 - DNA, 434 bp, Oryza sativa
  unsure (1)..(434): unsure at all n locations
agcttggagttgcgcctacagagtcgaagcttcttccgccactgtttgtggcacttggccaggtggttgatgctgcccggcgaagtacaccggcgcctgcgcggcttgtggcggaaagggccgggtcatcacttgcggatggacatgaggcggcacatagcctaccgaatactgaaggattggagccgtcgtggccttggtccgccttgctgccttgtatgcttgttgttgttcttgcatttggcgaagcatgtcttggagccgtgtcatgttctgccgcatggcttccatgtcggcttcggcttgtgcttcggggtcaaggcttgattgggcctgtacaacggtgagcgcggntgtggtcaccaccggctgcgatggagcggcttgtggcaccaccggttggctcgtcgaaaggatctccgccctggtctgga

SEQ ID NO: 76889 - DNA, 434 bp, Oryza sativa
  unsure (1)..(434): unsure at all n locations
ctcaagccttgggctttccgntacttcaacacattattatcattaattatttgctccatacatctaagagtataatttatataaaaaaaaaactctcttctactgcattatatagagtcctcattctaaggtatttgttttgtttatctatcaaaatatatttaaactatatctataatcataattcactataataatttgatctataatttattccaagtcgagtcttagtgtgacattctgacccaattaaaatttgacctttgtgacatatgagagctgtcttcacatatttagtacatcttactagttaccaagaatggaacaactatagcatatcatagttctgtagtaacatcccattagacttgttgggcaaaagcactttcggccaaagtcaaaatttgatgtatcttggagcaaccaaattggat

SEQ ID NO: 76890 - DNA, 359 bp, Oryza sativa
agctttgtacttttattagaatactcttctatatacatttatgaatgcctattttacattatgttcatgttatactgaatatacggctagcttatctgggagatgctttggtgcgggtataatgtttgcttatgcaattactctatgtcatgacgatgatattagagtagtatctggtagtttaggcgtggtgtctagattacgggatatcattatttggggttatatattgcggatgagaggtgggccgctgatggtgacagctcagtacgggtattcctccacgccggtatataattctaagttaatttcctgaggagggtattcctccgtatttagccccggttgtatggtcatga

SEQ ID NO: 76891 - DNA, 487 bp, Oryza sativa
  unsure (1)..(487): unsure at all n locations
tcgccgccacctcctccatgagccctccaacttcactcgttgcgtatggaaagtacaggggtgagcagcatggcacgcgtcggcgaaggtggtggcatgctccagtgtaggcggcaatgcgggcagcatgctccaacgaaggcagcgaagccagcgacatgggaaagaagcagctatgaagggagtcgagctcgaggcggccctgccgacctgccttctccactctcggcaaggggttgctggatccgaggaggtccaccgagtttcccccaccgaagccagtcacgtggggaggagctcaaaccctgccttcaccacgagctcctttctacgacggtgaagtatctccgggtcggctagacatatagcggtaggttgatgcgtgcgtgcggcatggctacttgcttcttcaatntcctcatgcacgtgtctctgtaggtgccggttgatctgtgcctagtcaatgtacccgcaacccggagctcct

SEQ ID NO: 76892 - DNA, 316 bp, Oryza sativa
agcttgccattgatgaactcccatgcttcatgtgtaaccagaccttcctgtggcagaggctcggcctacgaccaaggacctccgccgagctttccgcttcccccaacggccaaggagtccaccgcctccgtagctgatctgctgatggttgcaccgccgccgccgccttattcgatgggctcgtcgccgcagatggagtcgccaccgctttagccgatggggccactgctgccggtcgctctgcacatgaaccggccagctccgacggaagcggtgggcgccgtcggagcaaagcgcggctgcgccgacagtgggg

SEQ ID NO: 76893 - DNA, 447 bp, Oryza sativa
  unsure (1)..(447): unsure at all n locations
agaaactcagctaggtcggcctactgctgcgcatcgccgctattcggcatggagcttctgatgaacatcgctgacccatacatcaccgctggattcctcgcgccagccatcgcctcaagctggtgctgttgcgccgtgagccacgacggcgtgaaccgctgctgcttcctcttgaggcacaactgaactgccgccgtcctcgccaccaccactgttgcgctgggctcctcctctaaaacttatgtgtgcacgcacaagagagagaggtgtgagaggggaaagagatatggaggagagagatctgataggtggtgcccatcggttttctaataaaattattgctaaacagactgccacgtaggaccaaaaccgcttgcaagctgctangggggttcttggtgaagggaggagagagatctgataggaggaccaatcggttttttatta

SEQ ID NO: 76894 - DNA, 439 bp, Oryza sativa
  unsure (1)..(439): unsure at all n locations
agctntcaactgactgagagcttgctccgtccacacaaacggcccggggcgctagaggagtttgaataggggcagcgccctctctcccagcctcgatataaatcgacttacggcggccatgcatccagtgacacactgcacatccctaagcttgcgggggggggggggcgcatcctctctattgcacgtattttgtcgggattagcttctgtgcctcaggaggagactagaaaaccgaggagtttgcccgccggcacaccgaacacacacttgtcggggttcagtttcatgcgcgtagacctaagattgtcaaaagtctcggccaaatcctgcaacaaagtgtcctggtggcgcgtctttaccaccaggtcatcgacatacgcctctatattgcgccctacctgattactcaaagtaatacgagtcatatgctgaaaag

SEQ ID NO: 76895 - DNA, 483 bp, Oryza sativa
  unsure (1)..(483): unsure at all n locations
tgatgttacacaaccagcaccttttcaagagcaagtgccttctacatcacgtacatcttccatcgagaactttaacgataaatatgaacatattgacatgctattgcagcaaaacatggtgagtaaaggtgaatgtacaagtgatgcaactaatccatgcttgttttgttgtgataaattcaatgtcccacgttctgaattntatttgcttaatttacatgatgtggaattgataaatcataaagaagtgcttgctcgaataccccttgttgattctttgtatgaaagcatcttgagaaaacctgttcatatgacttgcttggttgtgaaagtttgtcgacttttgtgtttcatatcactcagtttgtaattatcatgttcctatactattaatctgattggtgattatgaaatagacaacaagcgttacgtgcatggtctacgcatgaatngtgacatgctttctgatttgtattgtacata

SEQ ID NO: 76896 - DNA, 333 bp, Oryza sativa
gagcttgaacacatgcctcgcgctattattttattagccctcgcaggacaaggagaagctgatgctctcctttgcccacacagatagcgagagcattagaaaccgatccgctctatttcaaactgactctgagccatccaaactctgccggcacactcttggtactactacttgttaaccaggagcagagcactatcactcctacaccactcgacagctattcccaatggcgtacacaatgcacgtacgtacgtgcgcgcgcgcgcacgcgcatgttgacacctctccgagacgattagtactccaggccggatttggtcatttacccctccc

SEQ ID NO: 76897 - DNA, 464 bp, Oryza sativa
  unsure (1)..(464): unsure at all n locations
aaacagtggttacagtcaaatttttgaattttgaagactggtttcaaagaaagttataaatcaacatgctaaatttattttattgtagcaagattaaataaaacagtattgtaaaacttttgctggtaaatgagccattagtacagtaatagatgtacagtactaataacactggaataaattttgaatgagaaccattaaaagagattatgaagtgcatgtgccattagtttggtttaattaaaagagaaagggaggagaacagttctacttttccaatatttttcagagggcttctatgggtaaccatttggcataacctanggtcaaagaggctctgataccaacttgtcacgcccggaatttctatccaanattccaaacgcttacatgtgtgtgaaccctcgtncaggaatcagccgaggcacacaataacanattgataatagagtacanatattact

SEQ ID NO: 76898 - DNA, 431 bp, Oryza sativa
  unsure (1)..(431): unsure at all n locations
agcttgctgctacgaagataaataataatatttatttgntntaatcattgatcattacaaatgctcaggaaagctgacatgatttgcagtatagtgcgcctaaaattaattaacaatcaattacaaatgcagtcaattgccaagaatgattcgcaattagcattatctgttgtaggtactgtttacttcagacaagggtggtgatgatccattcaagtaatttcagtccagctcggtacatggtgaacatttctttattcaaattaaagcaaagacacaatgcaaaacatactttttaataatgcacagtgaacattngtttattttcaacaatgcaaaacataatggttaatactggtttagaggtaacttgataccttgaataactggagtgaagtagtcaacagcagagcaggagtcctcaaatatta

SEQ ID NO: 76899 - DNA, 470 bp, Oryza sativa
  unsure (1)..(470): unsure at all n locations
tgcaaaccctagtccaagcaaaggcaagaggtagcatctattacaatcgagttgattgtatgtgtgtgtgtgggagagagagagagagagagagagagagagagagagagaggacattatctaattggagtttggagagaccaagtccaaatgacccctcccctgacttgatctagttgatgggctgccgcgatggctcattgggactggtacgaaaatatatgcacaatggagacacgaattntatgtggaaatgctgacaagcaatgatcactattgaatagttgattacaaacgtatggaaataacaataggaacgtcacccctttctgtacggcttacaagagtatatataggagagaaaagaaagacacctaataggaaaagacatggagtcctactaggaaactaatccgaatatattgtaggcctaannatcggatcacatatntaacagggactacggcaac

SEQ ID NO: 76900 - DNA, 465 bp, Oryza sativa
  unsure (1)..(465): unsure at all n locations
agcttgggagctnntagagtcctagattcatagtcatggcaggatttacaactggcgttaccttntgttgacctgttgaccagcagtgatctggggaagatgcaaaaatgaaagctgttgaaacaacaatattcagttaggaaccaaacccaagaccccaagacaccggggccgtcgatctccccaagaccccaagacccctatagtgtgcattgatctaatatctgccattattgctctaatttcagaggtgtatctaacattgatggtgagcttctcgaattaatttctacacattgtatttactgtgtctaacattgtatttactgtgtgttataaaacaaccatgccatttaacgacgccaaaacaacatattgaatttatttgacagttctatttgatcaatttgagcagagggactattagtactctagcacttcttactaaataccatatttgcataa

SEQ ID NO: 76901 - DNA, 457 bp, Oryza sativa
  unsure (1)..(457): unsure at all n locations
agctttgtggtgtcaagcatgtcaactcactgaccatatttatctgccactgaaactttgctcaatttgtaggcagcaatgctaatgttgtgagggtgtgtacgcatatatctgcttatatgtggntcattcacagattatcgcgttatgatgttcttttttcctgatgaatacttacattttcttcatgtttgttgcatcacaaaattaaaagagaagatctatctgccaatcattttcatgtgacccattttatatgtttctatcactttgcttctcaatggtgatatatagaagtctgagctaatgctctgtattcttccactgcagcgtgaatacgtggtatatcctcccgaaggtccacgtccaccacctcctgaagaacttcgtgaaagggctcgcaagatagctcgaaagaggcaacaaccacaatanatacatggaccatgatcacttc

SEQ ID NO: 76902 - DNA, 440 bp, Oryza sativa
  unsure (1)..(440): unsure at all n locations
gtccaggactccaagtacaatctatactataagagcttccattttccatgctctgagcagccatggcttgtttccttagtacaaaaggaggcctaagaaaagcccctaaatcaactagacattctacctaagccgttaattaaccgtgtgaaaggattcactccctatgaccctatctactgcattttaaccaaaattacctagaccatgattcagacaaatcggctatccttctgaattctgattttgagccaagaactaggaacatcttatgatatccggaagtacattcatggaagaatccccagaaaatggtagtaactcttttcctaggaaaagtcaaacctcttctaatcttttnttttctgaaactgagaacctcttcttatctgtcagatggggtagaccaatcaaccaatctggatcagaatgcacacaac

SEQ ID NO: 76903 - DNA, 458 bp, Oryza sativa
  unsure (1)..(458): unsure at all n locations
agctngtataacttgcttcaagaaatgcgaggtatcacatggtataatccatttttggccattaatgttattattggaataatttctgggaactccttttcaggaaatattcgagtattctgccggataagaccacttattaactcaaagtcaatttcttcgattgaacatattggaaatgatggctcaataatggtctgtgatccacttaagccgcanactacacgtaagatattccagttcaacaaaatttttgggccaacaactactcaaggtaacatgggtgtaaactgtacaaagaggtatcagccattatcccgttggtttggcttcatatnggttttcttttacagatgaagtttataaggagacacaatnattgattagatcgggtatggatggctataacgtatgcatatttgcttacnggcagacaggtctcggaaaactcatacaat

SEQ ID NO: 76904 - DNA, 434 bp, Oryza sativa
  unsure (1)..(434): unsure at all n locations
tatccttgtgtcacattngtatcatttctgcttgtcttgaaggttctgacgatcagaaanaaagaccttcctctagtgagcacaagtgattcaagtaaattcttgccagtctaattaaggatccacgtcgaagacaaagggccggtgcttcctctttatgatttgctaagcattaattaactgatcaattgatccaatgaccatgactccatgagtattattgctacatggaacgtgacgtgttctctttcgtgtgtacctgtaggagtacatacgtgtcgcaatgttgattctgctatcacttgatcaatttgaataaaattcggntcctcgaccgctatgctgattaagaagttcttctaaaaaatgttactaatggaatgtcttaaaacaaagcaatgagcatattacatatttgtactatagttttttac

SEQ ID NO: 76905 - DNA, 312 bp, Oryza sativa
  unsure (1)..(312): unsure at all n locations
agcttgtattcggtattggtgcgctcctttgtgtcctataaaatctgaaaacacatcaatacacatgggtcaatactaacctagcaaacagaaatgtcatgctgctggattagttacaggcttacagcaagcccattgtacatgaggttntnnnnnnatcttggtttatgatgtcagngnatgcaaattataaaggataatccgatgtanctagtagacacacgacatgcagtgacagatgaacacaatataaacttttaaaatgacaatttanaagggtttgtngcatctaccttgatgaccttggcacca

SEQ ID NO: 76906 - DNA, 385 bp, Oryza sativa
  unsure (1)..(385): unsure at all n locations
actcagctttaaaaacacactctcacattgacaagcttctcttcgtattagcattaaccataacaattagggatggcgcgaaagtaagcttntgggactcggcctggctagagggaggagactacccgatgttgcgccgcttgtctacaaggcctccaagaaaaagaacagaacacttcaacacgctttgcacactgaccaatggctgcttgaccttgatctccaatcgatcttgaactggacgacgcacatgattgatcaactcgtcgaggtctggaccgctgcccgggcagttcagctaataaagcaccaggagtacaacataacatggaagctcaccagccacagagaatatacgggtgcattcgcatacaaagtacaactt

SEQ ID NO: 76907 - DNA, 433 bp, Oryza sativa
  unsure (1)..(433): unsure at all n locations
agcttgccctgtgtaatatcatttgacgtattatattttagtggaaaactctcccaatacaaaacagacagttctctaacaaaatacaaaacaaacatattatccaaatatatgtaattttatatttaataaaattaattgggagttataaacgttactattttttctataaatttaatcaaacctaaagaaatttgattaataaaaaagttgaacaacttatagtatcaaatagatatattaccttggatggagattttgggatggagagggagtaacagaaatcgtcgcatgcaaggtggtttttctacagcatgcagcacctatgccgcatgccgttggatggatcccacgattggtgctgtatgtaaagtgctttgggcgtatatatttngtatattgtggtggacggtatataccacacattatacat

SEQ ID NO: 76908 - DNA, 358 bp, Oryza sativa
actagctggctgcttatgagagtatagaccacgtgctcttttttgtcactctcatcagtatctagaagcaatgttgatgtcctgatggtgctgaatactacacaatgttcattatctgttgcgttgcatactatatagaacttcacatgaaaccccatatttataacgcagattcatctataaaataaaatgattggatatcaaccacttactacaagcaagatgcagttgactggatgaaaacaaccctaagacttcaagccttacatgccttctatcattgggacggccttctcctctgtattccaccaacccagtacattgcggccctgtcctatttttgtctaaggcgttcgaa

SEQ ID NO: 76909 - DNA, 465 bp, Oryza sativa
  unsure (1)..(465): unsure at all n locations
agctnttgtcatcgccgttccggtctcctctctcactccccctgccggacaccgccctccccggacacgcgacgctcgggaacacactttgccgccggcgtcgccacctcccggccaccggagcaccggcgaccctctctccctctctcccctgtgactcgactggaaaggagaagagaagaaacgaacgaagaagaagaagaaaagaagaaagaaataaagaactgacaggtgggtccatgaacagtgcactttcatcttttctagatttaattcaaaccccaatctttagaagcccatatctcctaaaccatatatccgattccaatgaaacttggatctaaattcatctaaattcaaatccttcattttgatatcaaatttgctatattaagattntatttgaatttccttaatttattcaaataccacttgaataaatatttggattaattaatcttatat

SEQ ID NO: 76910 - DNA, 423 bp, Oryza sativa
tcgcatcgtcaccgggcgcacgcatgtgctgcatgtggttccacagcgagtggtacaccacgctgccgaacgcgccgcatgacacgaagatggcgtgcgcgacgccacgccggcgggcgatgtctgtcgtccacgcgaggaaggggtcggcgatgacgcagaccctggcagcgtctgctccggcgtcggcgatcaagtcacggacgaagccgtcgaagctgtcctgtagcgagcgcgactcggtggcctcgaacagcgtgatgaagtggaggggcggcacggcatctgtcgactcggcgtctccgggcaggccgtgctcagcatgcacgaacggcagggcgtggaaccggaggtaccgcgtctgggagcttgaccggcggcggatgccttccacgttgcgccgggtggagacgatggagatgt

SEQ ID NO: 76911 - DNA, 462 bp, Oryza sativa
  unsure (1)..(462): unsure at all n locations
agctttccatgcattntaaaccatgctttgtctactcggtcgcggcgatcgatggctatattcccctccgcttgtgctactgctaactaaagaacttctaataagcaaagattcgttcccgtggcacgtttaccattgctttttgtactgcctgtactccctccgtaaaaaaaagacaaaccctgatttccgttttcaacatttaaccgttcgtcttatttgaaaaaattataaaaaaaattaaaaagataagtcacgcataaaatattaattatgtttttttatctaacaacaatgaaaatactaactataaaaaaaatttatataagacggacagtcaaacgttggcacaagaacccatatttttgccttttttgggacggagggagtataccctagctaacatatgcatgtgcgatctactactgcagatgcttctcttcttcatcangcgctactacg

SEQ ID NO: 76912 - DNA, 394 bp, Oryza sativa
  unsure (1)..(394): unsure at all n locations
tatcgcataaagcgttaaatctaaaccacagacagaanatatatacttcttttccaccttatcaccaacccagcagcagcaaattccactagggcctaagctgactagtatacccatataacaaaaaaataataatagcataccaacaaggattgcgtttaccaagtcagatggagcaattttagttgactacagatcaagaaaaaaattgcagtgcaaagacgcttaaacactaagttcaatcacgaacaagcactctcatttgccacaaaataggggaaaccggngagggaaaccatactcgatctggagcagcgccttctgcgactcggcgtgaagctcctcccacttcgtgttgtaccccgcgggcttcccgtccgtcgtatatagcatc

SEQ ID NO: 76913 - DNA, 439 bp, Oryza sativa
catgcaagcttcgcccggtagcgatagaatatgtggttgccctcgcgacggtcatcccacgcacggagatggtaggacctcctcgaagggcagtctatccttggtgaagtgaggacgaccacgcgcgagaaagtgacgaagaaatgtttcggatgatagtgagtgacttgcacatcccgccgatggatccggcaagcacagcggaggtcatcggcaaagaccccctcctccaccggcttcccatgcactggccaagcaaccagggagcacgctgcatagtgcagcctgttgcgctcgatttcccccatggaggacatgatgatgaccgtggactcctggcgatgagccaacagctcgtccatggccgacatcgttgaggaggaaggcgctgtgggcttgaggcttatggaagcgcttgtaacgagtggtgggaagtcta

SEQ ID NO: 76914 - DNA, 457 bp, Oryza sativa
  unsure (1)..(457): unsure at all n locations
tgtctntcccgatcgtcgacaagatcgaggtctgcgtcgttcacgagacgtcgcggagcgtcggcgtcctccatcgagacatcggctgatgaacgagctatagactagtcatgatgacttgatgaagagtcggaccccttgaacaaacgagacaatcgcctcctcattctacacaatggagcaagaacggactaactcggcgagggttagaatagcaagaatttcacccgctggttagtttcaccaaagcaacttgtatgtatgcaactaagtatttgaatttaaggaaaactatcaaagcttgaatgaacttgagagaaaactttagagagggaatgaaaatgtgttgaaatgggatggaattccctctcttggctggctggcttatattggacacctacaatggttagaaatgacatgtgtggacccactagccgtaccctgccaaaagtggcat

SEQ ID NO: 76915 - DNA, 442 bp, Oryza sativa
  unsure (1)..(442): unsure at all n locations
agctttgagctatatctgccaagtccatatcagctccaccgggagaatgaggtactgacaatgccggtccacggngagcctcaattgatagcttagacttgggaggtgtaagctccgtcggtcgacttggacgaggagtcatcttcacaactatgtcttctttgggccattgtatgaacgtcttgcgcgcatcgccgaaagtcatgatttcatcatttgggggcacgggcagcagatagcctgaccaggtgtcctttactgtatcgatggacaccttggcatacctagctagcaggtctgcgccgtggaccttgtctgtaaccgagggcttgaaagccatgccctcagcgacttcaggagcganagttgggtggactctcgctagtaggacacactgtgctgcgccctgcataanggtgaaagttgaatttaatattggaat

SEQ ID NO: 76916 - DNA, 389 bp, Oryza sativa
tcctttccatctctgcatgtaagacatcgattcagagatctaattccactatgtgttcatggaactgcacgccactggttcaaaaagacacagaaatccagaaaaaagatctcaccaaacatgcacgaagcaccgaagcagaggtgaccagctatacatctcgggctctcggctctcccgtttcatgggccggaaagcgattcgacttgcgtgcgggccattttacttgggccggatcatggcccatctttgttaggtgaggcccatgatattgtaagttggaataagttcatttgagggcccttaacttgtcaacgaatcccattttcatccatctaccaaaaaatatgatttaatcgggtcaaaaacagaaacaatataggtcccat

SEQ ID NO: 76917 - DNA, 391 bp, Oryza sativa
  unsure (1)..(391): unsure at all n locations
agcttgaatcctgcgaaaaaatgatgaactctacggaccccaaattacaagcagaaacgaaacgaanaggcatctgctcgtttcgctcgtaggatattcttctgggtgcgaagcgaatacatgcagccatttctgctgatgagagacggctcatacgtatccttgcgttattatctgctcgccatatcgatacggtactgttctgtacactgatttattgtcaatacatgtttttttgttctatttccgatgaacgaatatttgcagtatctgttttttgtccgaccctagcgtgtctgaatgtcagtacctgtctgactccatgctgagtgctgacgcgatacgtatcttccaagtatatatccgtttgacggaattgcatctgattttg

SEQ ID NO: 76918 - DNA, 481 bp, Oryza sativa
  unsure (1)..(481): unsure at all n locations
tcggacggatcactcatattcgaagcatgtttatacaattctatcaaaagatcttttcgcccttcagaaccagttntttgatcacccaaagttactgtgatgtatggaaccatcttatcaagttgagctgcagcaacccataagtctagagcagtcaatgtgcattccctcatgtgcttcttattgtcgccaagacattttatgacatctgccaaaatacccttcataacaaatagaaaatatctgtgtcattataactgcaaatgaataatataaagtataatgcanaactagacattccaaaccttgcttgattnttcaacagcaggacccattgcagatgcaaggccaccaattgttgacaaggtcgccataactaaatatttattgctgtcataaagaccggctcttagtgctgtgaacaagctcactgtatttgcacgatgatcatcaagttatatgttaaatcacagataaatat

SEQ ID NO: 76919 - DNA, 429 bp, Oryza sativa
  unsure (1)..(429): unsure at all n locations
agcttttaaccaagctcttacaagatcttatcaatgcaagtggaatggtgacatacaccgactcaaccaagcaccccaatgaaggttggatgtatcgatgccttggcaaacacttgcggtacagctgtaatcaaatatgtggagctctgggtaggcttaaatatgtagcaaaggaatagcaaatgctcaaatcagataatgcaaagttgaataattgttcaaagtcaagtaccgtgctggtcctaggctagaacgtactagagacgcgagcctagacacaaacgatatcacaagatagcactaggaacaactcatgcacaactctgatatatgaagttcagctcaaacataacagnnattnctcttttctttctttcttctttcttcttttctttnttttttctttccttttcttttctggttnttttt

SEQ ID NO: 76920 - DNA, 484 bp, Oryza sativa
  unsure (1)..(484): unsure at all n locations
actcaagctgcatctttganaaatcatgaaactcacgctccatttgttaccatatagaaattgaactaggagcaagtaaactataccatgtagatgcaaagtttgacaaagaaaggggaaacaactccaacttaagcaaatcatcgctaccggccttaccacattgatcaacaaagcggccgatatgctccattgtagtcatagcattctcacctgtgaatntcgtgaagttgggcacctcaaatccttgcgggtatgggaccgaatctacatgttcaggatacgtcctttgatatgtatgcatggctactttggattctatttcactactatcccgcacgacattgtcatcatctttttcaacatccatatgaccgatntgtgactcggtcttaagtgacaatgctatntcactntcgcttgtgatacagtccgaaccgtcatttagttcggctatactctcaatggtgtcattgtctaagct

SEQ ID NO: 76921 - DNA, 452 bp, Oryza sativa
  unsure (1)..(452): unsure at all n locations
agcttgttgcttctgacggctaatatatttttgatgatgtggcacatcctcgtaccaaaaagctctgctttccctatataagataagattcgtagttntattttatttataaatgacaaaaatctattcctactcacagatcttgagtgattttttttaattatttcctaaataaaattcccggccaacggagtccggagccgtccaacaagattgttcctcacgccggcgtgccccccgccaccgcgcgccatcgccgtagaggctaccactgggacttcgaggtcgctcctctctccatctgggccgccgcccctctcgcggcaccgcgcggctnttccctgcccctcgccctcgccacctcgccgatggcctccggctgtgcggcggcggcgggatgctggcttctcccagccgatatctatgccctgatccgagaggtgtgtcctcat

SEQ ID NO: 76922 - DNA, 419 bp, Oryza sativa
  unsure (1)..(419): unsure at all n locations
gtcatctggcgccaacaattcagaggacacgcttctgttgatccatgggcgctgctgagtagccccaatgggtgcagtaccataccgaaagattgatgggcaccggagtgtggtcgatcatcggaggatcgacaggcgcgacagctgagggtgttaatgacttaattcactgtggccctgtttagttcacaccaaacttttcccaaactcccaacttttcatcacatcacatcacatcttagacttttctactcacataaactctcaactgtttttcaaactaccaacttttcccaaacttctctccgatttcagaaacttaacacaacctgtgttaccacatgtaggctgcatgtgccactataaaacatcagcgtacattggtcgntctagccgtacccagcattcaacagttgaca

SEQ ID NO: 76923 - DNA, 412 bp, Oryza sativa
  unsure (1)..(412): unsure at all n locations
agcttctatgtctttttaaaaaacctaacatatttactattataatctaatatgaaaagctataggcaaatataattcgcgatatctacttatatttaaatgtgagctcttacacatattacattctcaattactggaatatattntactacttgatgaaaattagaaacttcaaaaatatccaaacaaaaatataccacaatggttcaataaataaaaggtgaacctttatacaaacaacactcatacaatactacaagtatttcaatatggcgtatataatctaaaaaagaaaaatctaagatactgtataaacaatagcagcttccaaacggcaaagaatatcttataatggcaaaggatatcttaaaaaaacggcaactaacttcatataatacatccttcaaacaac

SEQ ID NO: 76924 - DNA, 297 bp, Oryza sativa
gagatgcagggattgttgaccaaccttaatgtgccgaatggtgccgatcgcagtactgtttgcacaatccctctctatgtgacttgcaatatgtgtcggaccatatgacataggcggacgcctgagcgtatgtaacaaatagagctcgtgccgtatactgaatgtaacatacaggtgatgcgactcttctgctcataccaataatatgaatattatttgtaattgttgacgattgatcgtaataacatgaaatggagataagaggacatgaaacaacactgacgctggttacatgtg

SEQ ID NO: 76925 - DNA, 429 bp, Oryza sativa
  unsure (1)..(429): unsure at all n locations
agcttaatgaggtanagggtccatatttcaaactcagaaaggattgagacaactatacccttttgcggggttatgtataacacataccaatagtagtcgattaagtttggcagggcccaccatataccaagtcttatacggaatcatacctcgtatatagaatagatagtgggggaaacgagccgcggcttgcagtggctcgcaacaaactagacttggcttggctcagctcagatagggaaacaagctaaaacttgagctcggctcggcttaattctggctcgagccagctcgagctggcttgcaagccttcctgttgaaacacctcttcatatatattntgtaattattaaaagaagcaagaacaaatcatcaacatgtaaaatctaaataagtntatatattcaattcttcaaatcttaatgataa

SEQ ID NO: 76926 - DNA, 380 bp, Oryza sativa
  unsure (1)..(380): unsure at all n locations
actcagctanttagcgcgggagactcactcacaggcaaatctttactgtatcgactaaaccaactccaacaagacagctgcaactagaaagatcttcagctctggtgtgggggaaatgagagcaagactgagtactacccactgtactcagcaagtcataccggaagaggaggctaggggttctnttgcactaaagctagcatttaaaagccagtagtgaaagcagtaaaacagctgtagtaattaaccaatatttaccaatcactgtccaacactacaccacgttgtaacaggcctcaccaaccacctgaactacaccagttcattaagcataactatggtgagactaatcactgtgaatctggttgatcgcccataac

SEQ ID NO: 76927 - DNA, 355 bp, Oryza sativa
agcttagcaatctgcaaatgctttatctcaatggttctgtactggagtggccaagtgaaaccacaatgttaactaaacttcaccacctactcgtagatgggcggtttgggatgtcaacacgtagcaaaataagtcaactgcgacatctacagtctctgagaagcatagaagccaacagctacatggttaaaaacattggatgcttgacagggatgagatcatgaaggtactggagtcccacaacacagatctatgggcctcaatcagacatctctgaattcattcgccgttgtctcagaagatcgccaccgatataatcgtgatctatggacaacttgaaacctctatcttacct

SEQ ID NO: 76928 - DNA, 279 bp, Oryza sativa
  unsure (1)..(279): unsure at all n locations
gacccaancaccgagctgcactgaagctacaatgcaacaattttttcactcgaagcaaaaacgaacaaggaaggtacccagcaagacaaaaaacgcaccaacatgtccaaaacctgggaactgctagattttcgaagagagggaacataggaacccagtcgtaccatcttgaacaacgaacaaagaggaagcaaggcttcaaagaacaagcacttacctcagcgggcggcaacctcccttaccatcaaccctaccttgaccaacaacattcatgccgta

SEQ ID NO: 76929 - DNA, 492 bp, Oryza sativa
  unsure (1)..(492): unsure at all n locations
actcagctttagtagctgcgggttcttttagaatctcatgctcctttttacatttatattctcgcatatattctccagttacttggaatctcaagccccctccaatagagccttaaccttagaaacttttcacaaatgtgtatactacatgaattgaactgtttttttaaaaaaaatgctccaaaagattaatgcttgcaagatgcctgaaaagtttgaggctccaaatgccagtttggtactctgaactctgcagggtaaccttcccctgtagcctgtataggcaatggtagcaactatcaaggcaccagctttccagagaggttgcaatgcaattgcaatgggacgaacaagaacacgacgtactcgctaaggagaagtatacgctggttgtctagtactgtactactnggcatacggcagagagaaagctcaccatctttctacttggcacaatcttctttgacttttttcgtntcactttcaccgagt

SEQ ID NO: 76930 - DNA, 446 bp, Oryza sativa
  unsure (1)..(446): unsure at all n locations
agcttgtagacantttgcatgtacactntgttcgtatggttggcgttggcagccataaacaggaacaccattgtctgtatgttacttgtttacggnctcatgtccagctgtttgaattttgtacctgaaatatttttttctttggacaaaaagatggagtatttgaatatttcgctcttgccagtgacttgtgtattctatagtattatatgggtttttctttgagtaaataaatgcatttgccaaccctggttgctgtggtgtacaacaaaacaatgcaagtgttcctcgatcggttgccttgttgcaaccttcacccctgcgctgcatgctgtgtgatttgctaattgggtttgttatgaagcttggtatccgaacaaaatcgacgcgtttgcatgtgatttgctagttggaattgtatgaagctgttatccaacaaaatctac

SEQ ID NO: 76931 - DNA, 411 bp, Oryza sativa
tctcttcttcctgcgtctggatctcgctcaagtatgcgttcacatttgctttcttcttcctccattcccattcccccctactctcagatgcgtggataccccttcctctgatctacaggtttctcctctgcctgccactccccatggctcttgattcaggtcgctcttcagcattcactaccgtattcacttcttgaaggccaatttctggttcctcaccaaaggttggttactctttctttctttcatgtcatccactccaagttgactgcctctgttaatattctatctttccaactgttgcaatggtagtccatatttactagtattttttcccttggtaagaactagtggccaatttaacttacatcttccaacgccctgtatcatctatgtcaataattatgtcac

SEQ ID NO: 76932 - DNA, 460 bp, Oryza sativa
agcttgatcagttggcagtctcaaaaacaaaaaggtagtggctttctcaaaaacaaaaggtactgctggctgaactgcttggaggagaacctaaccaaactgtgatgaagattgataataagtctgcaatcaatctctgcaagaacccggtactgcacgatcagagcaaacacattgacacccgatatcattttagtagggagtgtgtggagaagaaacaaattgctgtggagtatgtacgttctgaggatcaacttgcagacatgttgactaaacctgttggacgagtttgctttctggagcttctgaagaagatgggtttggagtagacacatcaagaatggggggtggggaagagtttgatggataatctttgtgccaacgaaattatcttaagtgagttgcgtgttttcattattagttgcactattttgtaacagcatcgtagctttggattctt

SEQ ID NO: 76933 - DNA, 452 bp, Oryza sativa
  unsure (1)..(452): unsure at all n locations
tcggatgtgcatcgactacaccgaccttaacaaggcatgttctaaggacccttacccncttcctcgcatagatcagattgtcgactccacagcggggtgcgaccttttgtgttttctagatgcatactctggttaccatcagattcgcatggctagggaggatgaagaaaggcttgcccagccgtcggcgcgacctgaccccttatgggagacggacgcgcctgaccggcccccgaggcccgtcggagtccaggcctcgggacccgaggggagcgctcccagctcccttagattgattgcttggatcgttgagatccaagcatacctcacagataagactctacccgaggaccgcgaaggaagtgaacgcgtncagcgcatctncaaacgctacgtgttgatagaagggaccctctatcggcacgcggctaacggaatccctctgaaagtgc

SEQ ID NO: 76934 - DNA, 453 bp, Oryza sativa
  unsure (1)..(453): unsure at all n locations
agctttctggcgagttggctcagcacctcatctaatagctgctgtgcatcggagttcttcttgctctgaaacacaaggatcacaatcagagaaacagagaagaatgagaagaccacgatcactgtcgtgaatccggtctcgaatggtttgattttgctcttgctcgcagcgatgcccgagtccgggactctgtccacggtgatgttccagctcaacaagccgtatgtctcgccatcggagccggaggcaaagaaaccgatgtacgccttgttggggacacaggtgctcatggtgaggtgcccggcaaagatggcctttgatggtttcagttgcccgtcgttggccatgtacgcaaaaatcttgtgcccgatgccgtcgtagtcgatccacaccgtgtagntcacggctgtgcttgtcgacttgttactgttgttgttgtaatcgacatgatgc

SEQ ID NO: 76935 - DNA, 481 bp, Oryza sativa
  unsure (1)..(481): unsure at all n locations
cttgtaaatgagttcacaganaatgcccacttttgatctattctttaatcatgtctctctgatcagncagaataataatctgacattactgctgtattttctgctataacaccaatctgtcctctatcaaagatcttctaaatctaaaagcactccaaccctcagcttttactttggccactgtaaaaattgttggtaaagaggatattgtatggaataaggaattgcggagacacaggtctgcctctgaccaattgtcctccaagaaaaaaagtatttgntccatacccacatcttttaattcatagttgtttatgcttttcttgtaaagtttgtcaaggcttcatatcttaatacaaaatatatgcaagccttatgcacattcctgaaagacacttcttttgctttttatattgcagttttttcgtgaagaacattcatttacaagttacaacattaaaatatatcttatcatcgattc

SEQ ID NO: 76936 - DNA, 401 bp, Oryza sativa
  unsure (1)..(401): unsure at all n locations
agctntannaaaagaaaggaagagagcgattcttggcggttcttccccttggcactctagtgcattgttattgatgtcgttacaaagtttctgccgctttacgcccattggcctctcagaactcacagaaggtcctccagggacagatgactgaccagagtgtcttattctgtcttcctgcctcttctgtatggcctcataatatgccttcatgtattcttcctacaccgttaaagaaagaactactgaagctccacagtaatgaacacttttgactgtaaatccaactttcagatcatagcacgttttctaaactgacctgtatatttgtacctccctctccacacacagtagaactgttactgaggtgtgcttgcttaagtttcataccttttcttatc

SEQ ID NO: 76937 - DNA, 417 bp, Oryza sativa
actcaagcctatctctggccagctgcatcgctctggggtgctccaactcttacttcactgcatctctttcgccgaaggagaggagacggcgaaagagatacaccaccggctgtgcggtgcacatcaagccgcaagaacggtcgcctccaaagtgtatcaccagggagtctattgccccactgtgctgaaagcttgtgtcgagcaagccaagaagagcgaaagctgccagcggtatggtcgaagccaaactgcacctcagtacgagctacaacctatcccaccaggatgggcttctcgcagatggcggctagacatacgtggactattccctgtggcgagaaatggggacaagatctcaattgaaccatcgatacttctcctgctggatagggccgaaccactcggtcctatcacctt

SEQ ID NO: 76938 - DNA, 453 bp, Oryza sativa
  unsure (1)..(453): unsure at all n locations
agctngcaattcatatctacagcaaagcatttgtagctngcaattcatctgtaggacaggcatataataaaatctgtcagccatcggcaatggcagtgtgagcatttctattttctttacttaccaaacactgtgaggctctcaacagaactggatagggctctctcaatcatttcatggccaaggtacaacaatcctcatctaacttagatgcttcactttcctgattacaagtttacaacatctccttaaaagttttgaaccataagcaaaatttatgtatatgctatatggaaccaaaaccttcaagatcaaactaaaaggtagtctaaggaacaaaatctatgccaaaacggtaacgaatactactatatttgaaaaatacttgataattccacaaaaaatatccacgagattcatttgagtagataatgagatggaaataaaatgtag

SEQ ID NO: 76939 - DNA, 456 bp, Oryza sativa
  unsure (1)..(456): unsure at all n locations
atgtatatattaaatgttggtctgtcgtggggcatgtgtaaattntatatagccattgtttcttaagagtaaaataagacaccagttattaaaattctgtgtggaatatcattgtggttattaagctttgaaaatacatagtatattaagaccaaattaatttgctaaatatatcgttgcaggtctaaaatctaatacatcagatctttaatgctaacagccggatataaagaaagtagataaaactaattgaggaaacggatgttgtgattaattgaaaagtagatgtaggtggaaaaaattgaatggtgaaagtttgtgattgaccgagaagagaataatggtggagttattatgntttatgacaacatttaaatattagaagttgctatattttaagaagtaccactcaacgatacatntatgagcgtcaagatagacattgtattataagct

SEQ ID NO: 76940 - DNA, 433 bp, Oryza sativa
  unsure (1)..(433): unsure at all n locations
agcttaggacaatgcgaacaaagatgatctattgaaccacattcaaagcaacgatttggaccaccacttttcctgttcctggcattattcatagctcgagcaattctgttagtgaccaaaaccaaatcctcctcgatttgttcgagttgatcatcggatgtggcattaaaaacagcaagaaaagatgacttagatgaagaagaaaccaaagcactcgatttagaatcaactttgcgagagagaatattcatctcatgtgttntcaatttagtataaagtgaatccaaagtcaaagtagacatgttaacagactcctgaatagatgtaactttcatctcccaaatagacatgtcgagaccattcaaaaagtgacgagaaatctcagattgggataattagcatcataagaagaatcaacatatctaagatcact

SEQ ID NO: 76941 - DNA, 370 bp, Oryza sativa
tgaaaatgttcccatattcgttgtatgcctactctgaaaaagcttgataaatggaaccatatcgaatttacaattacttgatctggtgttaatccacgccaaaattaaattaagtctctgaatctacctacttttgacctccatagatacattatgcagcagcaaggcaaactaatctgctactaaactactaactattatattgatcaattgattacataattcacgtgtcgagcaatgcttatcttccatccttgaaagctgaatatcattctatactaagcctatgtgttcttgtctccaagatggaattaaattctcttcaaaacgtcattacagccgaagaaaagcattggaaatatcatctaat

SEQ ID NO: 76942 - DNA, 449 bp, Oryza sativa
  unsure (1)..(449): unsure at all n locations
agcttgaacagcataacatgatcacataagctacttattctaatgaaagctagacaagagatcaaactagcataagagtgacacatgcatagcatagtgatgaccaagagataacaagcaaagctcaattgaagaatgtataatacaatgcataaactaaacatgatgcaatatgttacaaatgcatgcaaaagaaaaacaactccccctcaaatcaagccataggggtggatcacccctaactcactccgcaagaactcaaaacgagagcgatcaagtggttttgtaaaaatgtctgccaattgtgttttagattcaacanactctagcacaatggtacctttctcaacattgtctctgagaaagtggaccctatctcaatgtgcttggtcctggagtgtggaacttgattntttgcaatattgatggcacttatattatcacaaagc

SEQ ID NO: 76943 - DNA, 458 bp, Oryza sativa
tgatccgagtcatatcatcggtatataggaagaccttccatgacaccattcgtttccatacattaatttaaaatctgtaccatacacactagtgggagaagagtggttatgtactccagtcaaccaacaagtgtatgctatatatcgttatttgtccttatataaactgaagagggtgggacatgaaaaccaccctaaacatgtttaactgaaagtatagaggacaattatgcatggtgtctgagacttattggctttaatcggattacagagagttctttattatgtcatgtcaaggaataactaaaacagagtacaatgggattggtggaatataaatgtagttctatttaccttcataattggttttactcccaagttgttttctctttctactctcaattcttgagttatccacagacacataagtcacaacaatgtgcaataaccaattcttg

SEQ ID NO: 76944 - DNA, 389 bp, Oryza sativa
agcttggtgatctccgcttccgtgtgcttgtctctgctggacttgagacagcagcaacatctggtagcatccttgctcgaacagctgacatgactgggaatgtgttagctagatctcaatttgctattttcttgattgatgtcaggtgagtaggctatggcttgatttcaattttcaagttctcattgttgagtcaattttaagtgttggcacttgttgcctattaaaagagcaatgctctgtttagggatggtctgcagccactggatcttgaggttggacaatggctgcggagacatgcatctgggatacataccattgtagcaatgaacaagtctgagtcacttgatgagcatggagtgctgactgcggctgctggagaagcccat

SEQ ID NO: 76945 - DNA, 397 bp, Oryza sativa
  unsure (1)..(397): unsure at all n locations
agctgggtgtgtatagtataacttgctggatgtgagtgcattgagttaagcttggtggtatctcaccttggagggagttgttccataagccgagtacctggagattgctgcatgaggaaagctcatctggaatacggccttcaagagagttgatgctcaagttcaggtagctgatttgtcccaagcgcccgagctcacttggaatttttccaaggaacgcgttgcttgataagtcgaggcttgcgatggagctcaaattgccgatgcaaggtggtattgaaccaccaaggcctttggagctgacgttgagtgccatgactcggagttgggtctgtgtgttgntgcatgaaacaccctgccaattgcagaagttctgggaagtattggtccatgagct

SEQ ID NO: 76946 - DNA, 416 bp, Oryza sativa
  unsure (1)..(416): unsure at all n locations
ctcaagcttaagtccnatagaaaatcgaanaagaanaactctgtatcataagatatcgaaataaaagtaccaagttgaaattcaaggatgaaaaaacaaccgtcactcgagaaacaaaaataatggtttgaagtccaaatagcatgtcaaaagcatcaatagaggagaacgttcgaaggtaaagaaatccacctaaaacataaagtttaaacgagaagatgaaaaatgaaccgtcaagagagaaacctacaaacgtttgatacaaggaaaccgcgattttcataaaatcttcaaggtgtaacaaaatgcatgcatccaactcacaataaacttatttctttttcagtaaaaagggagacccaactctacaactcaattataggatcaagaataacgtctggacaaaataaagcagt

SEQ ID NO: 76947 - DNA, 421 bp, Oryza sativa
agcttgatcttggcaaggcgccagtagcttctccaatttctctatccgaattcacattgggcatgccattggtcggagacaatgccttattcaagatgggccctgcatgcaaggagttgcacgggtactacatggagaagtccaacgcaaggaggaagaatagagagacctccatgttgggccaacatgatggtcagccgttcctcgggcctactgccttcatcgccgtagacttcaaaggtctatgggacctctacagggtgcgagcgatcgacaccaacctccttaagtgctactccttgtaagtataccttggtacgcgatatggtagtgactgtccacgaattaagcttaccctgactcttgtcttgctcgtatgttaacctggaagcattgtcatcgtaaagcacccatgttgctt

SEQ ID NO: 76948 - DNA, 466 bp, Oryza sativa
  unsure (1)..(466): unsure at all n locations
tggatacgttatatggtgtataataatctacactagatatataatgttgatttgngacgcggctttattagagaagaaaatgagagaggtaatttggatcatagattaattatataaaggctaaaaaattgatgtgataaggcttaatgagataagagagaaataaaattaattaagtgaggattactatatataggtatataggatattatataaaatgatgtaaaaatatatttaaatattatgtgaattatgtgagataataatttaacatgattaccttctagagctattaaatttaatanattatagaatngtcgataatatagcatgcttgatgtttaagatgtaatagttattagcgaatgatgatataatatctttgtatattaaactttatgatttattggattgtaagttacactatgataggatntgngtttttattctcttttcggtattaacc

SEQ ID NO: 76949 - DNA, 444 bp, Oryza sativa
  unsure (1)..(444): unsure at all n locations
agcttcacggggggcctcgccatgatcagcttctgcgagaagaacgctgccccgatcgtcgactcctgaaaagcataaatcttcagtccgaaactgaactgatgagaatttaaacaacaattaagcaggtattggttaattgcctggcaatcgtagtacaatcctttggcaaatcgaaccacgatgctcgtcttcccggctcccaagtcacccagaagtacctaccaaaatattggaaatgcccagataaactgacaaggatcaaagaaccaaacaatcagaaaattcatggtaagacatacccaccagcttggcctgtataacatcgctccccatcgatcgatcgctcctagttcgctnttaccgctgtcgcttggatcaggataatttagaaattgatatgcgagcagaagtgaagtacaatgcttttctttttttagttga

SEQ ID NO: 76950 - DNA, 325 bp, Oryza sativa
gaagacgtagacgacaacccaccacaaacatctgagctgatgaagtcatcaaaggagttcaccgtggagaagcataataaccacatggttgccaaggcgaccacacttgcctttgaggagtatggcaggtcagggcataatcaaccggagcacgacaggatcacgctcatgctcacggacttttatcggacgtcggagtcgttgaccgccaaggtatggaggagctcacaggacctgactagctcgcctcctcctaatttgtgacagatttacagctcaggtgaccacccactgatcacctataacacctaaactcctcacccgg

SEQ ID NO: 76951 - DNA, 451 bp, Oryza sativa
  unsure (1)..(451): unsure at all n locations
catgcaagcttagcctgcatggcnncnanagattggctcaagggagcgganagtttgatcggcgccgtggtgaaagactcctccaaatccagccgaaccagaaccggatttacagcagccgcacccaagggtagccgcctacctgagcataggaattttaccagccggatcgagagaatatgagcctaaatcgaccacgaacgacctgaatctgataccactgtaatattcgcagcgatgatttcagaaatagatggggattttgggaagaacagaaggggataggaagaacagaggagagaacagagaaagtttgggggaggattagttttcttccttttcattcatgatgtcttccccaccgagtggtcccttgtcttatagaccttacagctaagcaacagcatgagctcgcaggcccaacaacccaacacaactcatgtgagcgcgc

SEQ ID NO: 76952 - DNA, 442 bp, Oryza sativa
  unsure (1)..(442): unsure at all n locations
ntagaattagtgggttgtaactntataaatagtatagattgtggaggcaagtagagtagtagaagaagaggataggggcatattagtcctaaaaatcttcagccttgttaggttgagatgatttttgtaagacaaaaatgtttcattagttcatttgaatgtgttgtaggctaagggagtgtttggatccaggactaaactttagtccctgtcacatcggatgtttggacataaatgagagctaattcatgtgacaatttttttaagcctaattaatccataattagcacatatttattgtagcatcacatatgctaatcatggataaatgatgctcaatagattcgtctcgcgaattcgttcaaggttatggaatgggttttatcaatagtctaagcttaatacttctaattagtgtccaaacattcgatgtgacagggac

SEQ ID NO: 76953 - DNA, 414 bp, Oryza sativa
  unsure (1)..(414): unsure at all n locations
agcttgtacatgaggcaattcagcatagttgttgtgccttgagcatcaacacgatagttaccatccctctggcaacaaaataacatgagaaatcagaatagtgaatcaagctcatatatttgtttcactatttctattcttccttatgcccaccaaaatgatgtgtaaggcaccatccctaaaaagattcacaactcacaagataatcaggttccttgatgtgagggaatacaccacctcctatgcgaaccatccaaaggaacttgttaatatcatcgctagggtagccaacaagacctgtaaagtaaacacccaacgtcagggatctggggccactagttattganttgttctaaagaagtccacaaagcatcaaccttcaaatacaacaaggacatatntgacatctaaaga

SEQ ID NO: 76954 - DNA, 402 bp, Oryza sativa
  unsure (1)..(402): unsure at all n locations
tttctgggcattatgcctcatttcgccttgttccgctgtatcttctttctcaagccccaaccaaacaagagttaaccatgcatcgttgggggtgctggtttccaactcangggaacactaagccaaaaatacttctccatgcccttcaagacctcaaataaaggctggcacgcaaattggttttatgttcaaaaccccgagcctgttcttctcgagtactcctgtcttcctccagtttatcgggatacttggaactcactgccaatgggagacgaagctgcacaagcagtagaactgatggagaggatgataaagctgaaagaacagggccttcaaggagaacagatcacccggcactttatcaagtgtcggttagctccaatcaaagaaagatctcgcaca

SEQ ID NO: 76955 - DNA, 419 bp, Oryza sativa
agcttgctatggtgttctaaaagttccaagatgacaatggttctgtaagccctgcaagatcaatacccaggacacagtaagaaaattcaatttcagagtagtttcatttaaggcatttaataaggcatgatgtagccatgtaggccagaacagccatctttgtgcttgcagattactgtgtgcaagcactataaaatttttcactgattcttttaaggctatttgtagaatgaagcttttattgaaatcaagataattacatcaaggtgatacaaccatttagggatacactgctggtatagatgtatggacgctgcactagcatggaaaatacttcagtcaaaattaatcttactaacactaacatcctcattgttagatacatttagtagtgattaattgtatatcggtatctcttt

SEQ ID NO: 76956 - DNA, 328 bp, Oryza sativa
  unsure (1)..(328): unsure at all n locations
tctaagcttcgcgccgggcgccgaactgggtgctcaatgagaactttggcatggnatgcgggctaaaggtacagggcagtctgcgtgggtcctttgataggggtgtcatcctctggcacatcgccactgacctttgcatgcgccgcatgatggctgaaaacaccatctacgagattgacaggaaatttctcgagtgcacggaggcgatatcggactacatggcccaccttctcaaccttcgccctgacatgctcatgaccggcagcaggcagcacctcttcacgcatgcaatggaggaggttgagctcatcttgaaggatattgagtc

SEQ ID NO: 76957 - DNA, 431 bp, Oryza sativa
  unsure (1)..(431): unsure at all n locations
agcttctaggaaaataagcgtattatcggtatattgaataataggaaagttattatctcctgaaactggaattggcagagagagtatccccctgagatgagctttgttaattatggcttgtagtaaatcagcacccaacgcacaaaggagaggagagagaggatctccctgccgaacacctcttttacacttaaaaaactttcctgggactccatttaagagcacttttgtagaagcagaagaaaagatgttactcatccaaacattccattcatccgggaagcccatagctaacatcacttgaaggatggcaccatgttcaattgtatcaaaggctttctcaaaatcaagttttaataaaacaatctctctttttgactgctcgcactgatgaatgtattcanaggcccaagctatgcagtcttgaattt

SEQ ID NO: 76958 - DNA, 327 bp, Oryza sativa
actttctgacaggcatttccaagcctcacatgcttccttatgccgaccagaggggttccagaccaacaacaggttaggtcccagaccatactgtgccaggaagcccaggggggtcctcttcgacaccaccccggcgaatccacatgtctctcggcatcatggcttccctgataagcaagttactcagccaggggtgtcccattccacccatgtggtcgcacttgtcttatgttcggatgaaattccaaggaatcggcccttaaatgcgggagcgggaaaaccgtacacccggtacgttccccagtccgcggctttatatattcattt

SEQ ID NO: 76959 - DNA, 375 bp, Oryza sativa
  unsure (1)..(375): unsure at all n locations
agctttcgaccgganagaaaaggttcanaaagcaccatatcatgatttttggacatattggagtgtattgggggcgttcgtggcaaaaacttacttcttgattctcgcggtgaacttttgtccattaatgccaatattgcaccacacgggtgcgatgtttttgaccggaatgaaaaagcttaaaaagcaccaaaacatgatttttggacatattggagcgtatttcgtgcgtttgtggaaaaacttacttcttgattcgcgcggtgaacttttgtcaattaatgccaatattggcatatattggctcacacgggtgcgatgcttttgaccggaaagaaaaggttcatacagcaccatcacatgatttttggacat

SEQ ID NO: 76960 - DNA, 425 bp, Oryza sativa
agcttcttgtggagtggaatagaactggcatgtttgatatgtctgtttaagtttcagcaatcaagtcaaatgtcagctactggcatttggaagagttggaaactatgctactgttcaaattcaaacagggatggtggctcgccggttcgttcaaaaaaaaattcaaacaaggcaatattcggattagcataccctgtattcaatttcctcctctgtataccaatttggtgtgtaccagaaattgtatggttcattaggctgtccccagcgagctatacaaactggctgatccacaatagtagccccctgtaatgatgcatagtgacatcaaatgaacaatagagaaagttggtgtttgacaatgtcaaagagatatgatgacatattagtaatctaagtaggtgccagagcagattagtaatcta

SEQ ID NO: 76961 - DNA, 439 bp, Oryza sativa
tggcaaacaaaaggcccacaagagcaatgcatgaaaggtgcttatcagcttatttctatctttgggctttggtgtctaataaaatgaagaggaccaaacaaagacaggatatttttatcagctgtaacttacgcaggtaaagagagcactacaatgcactgccaggaagatcaagttccttgaatatatacaccaaactctcaaaagaaaggacctcactatgtcttatctcaaccaaaactaatgaattaataaatctaccataatactatatcttggcagggaaaatctttagcagagtgggaaaatctttagaatatgaaacattattaagtatagcaaaattttccttttctagtggtactattatttctacttgcttagtagttacacaataataaatgggtagattatgatggttaaaccacgtaagatagtg

SEQ ID NO: 76962 - DNA, 297 bp, Oryza sativa
gcatgcaagctgtgcctgaaggagctcttgcgggctgtgatcttctggttgcagcagacgcagcgacgcttgaggcgacagacctactcctgggcgagcatgagctgatgcagctgcgcctccactgcgtctaggcgcttcttcagctgcagattctgctgacgacactccaaggatcttatgttgatctcgaccatcccacggcgcaccatctgatggaagttgaaacgagccgcgtcgtacgcctccaccatgcgcgccaggtgcatgatggtaacgtcatcctcccagctagca

SEQ ID NO: 76963 - DNA, 415 bp, Oryza sativa
  unsure (1)..(415): unsure at all n locations
aagttgaatactgaatgactgaagcaaagaactttgaattgtttaagatggntngagaatgggatgaactccttctaccggccataccctttttataatgatctaccaatggctataactgtgaggtgggacccactagccactggcacaaaaagggataacctgaccgttgcttctgccgattcggccgaaccattggtgggcccaactggccccacattcngccgttggactccaacggctacacgtgtaggagccacgttgataaatgctgcacaatatatttctttgtgctcagaagattcattgtccaaatttgtctcacatattaaattcctaatgcaatgttttcaggacattccaatatgctatgaatgcaagaatcaaattgatgaagataaacatgagatacata

SEQ ID NO: 76964 - DNA, 281 bp, Oryza sativa
gataacagaacagccagtagaagaccatgactccttttgcacttacaaatattcctgctacaaactgatatgtttgtttaataaaggagagccaagcatataaagctccaatcatgcgccaaattgtccaatatcctctaacattatatcaaaagattcgagaaaaaactgcgttatgaggaattgctgcctcataaaaccaatctgcgatatactcatgagcttttccctctctatgaccttacagagtatactcatttgagttggatatgctttccctt

SEQ ID NO: 76965 - DNA, 459 bp, Oryza sativa
  unsure (1)..(459): unsure at all n locations
agcttgccacanatggttccctgtctctggtttttcagattacccgctatctttaccttgtaatccttgggatggagggaagagaaagcatgccactatcttctgaagtgtaagagcacccgatggtgatgccagtgcggagatcagtaggatgttttatatgtttgtactgaatttttttatgaactaaacaaggttactgttattttcatagcagtgaataatatacatcgcacttgttatgaaaagttcagtttaaacaaaaccaaatgagcaaaaggattatttacattggtggataagataaacaaaagaaggaaccaattgaatgctagtaataagctgagaatttagtgccatatagtatgttttgcttccctccatgtatgtaattatttgtactgtttattattgggccatttatcataagcattgtgcttctaaactacacctataatg

SEQ ID NO: 76966 - DNA, 430 bp, Oryza sativa
  unsure (1)..(430): unsure at all n locations
ttttactgttatccaacagactccttgtgaaaacataactgttccgaatcactattaataattgtttctaggctgttcctgattgagctgaaccttgttccaagtccattttcaacatatatctaccaatgaagacctctatacctatgataaacattgttttctagtttgttcttgttagtaatgtataaattattcttttgcaggacactgcgaaatagtagagttgtttctttcaaaaggagttgatgtggatttatattctatcgctgggaccccattgctggcagctgcgattagtggccaacatagcacgatgaagatcttattggagcatcatgctgatgtaagacatcagtttctttgttgctccctcatctgtgcanaagacacacctgacctatcagtttctaaaagagatgcctgactt

SEQ ID NO: 76967 - DNA, 454 bp, Oryza sativa
  unsure (1)..(454): unsure at all n locations
gcttgcagtgtacgtgatgagtatgctcttccagatttccggcgcttcaccccgagttgcatggctggtcacacctgtcaaaacaaagcaccgtgattttttcccaagtcgaactgatccaccgtcacagtctcagtttccgaatagtaatttattatctcggtgctgttgattttttttccatatgcgaccaaagcaacgcgtgttaagtcaacttgaagaaaattgacagcgcaggctaatgttatttcctttttgcgcgaacggatcgttcagtcgtacggagaagggatcaattntgaccaccagggtttaattatgtgatgtgtgaacggtctattttctatcgtggtgatatcacaaacggccgtttacaaggatctaacggattgtgtatggaatactactccagtcggaagaaatanaaacttccatggagggaggaatcgacttt

SEQ ID NO: 76968 - DNA, 475 bp, Oryza sativa
  unsure (1)..(475): unsure at all n locations
tgtcgccaggacgcaaggtgatccactggtttaaagcctcctatatgctctcaacttatatttgatacttgtgtatgccttatcttcatcactgctcaatactggatccttcatgaatcatataacttttgagagtgagtgtaaggcaattcatctggtatatctgaagtagactcttctgttttcatgtggctgagtagagcctactggcatttaccttggaaactaggaaacaaactctaccaagagctatttcaagtcaatgtttagcagtacatattcacaagtctaagttgttatgttaagtttagcttcatgatattgtgcaacaaaccatgtttgatagtggaatgtaagccattattagtactggagttgaagcagcctaaatactgtttgntagcatatacaccatntagctctcatctcttcttttntttttggcaaanaatagactacatatcacggtctctta

SEQ ID NO: 76969 - DNA, 415 bp, Oryza sativa
agcttgttttcaagtaatgcagttcatcattctctgaaaacaagtttcccccctctcagagaaaatccagctactttgaatgaaatgcccttccctgtaaaacaaacaactattctgcccccatcagaagaagttccagctatttcagcagaaagtggtcaccattggaaagaaacccctgctgaaagcttgtttgcaacgaatgcacttcctcattccctgaaaacaagctgtcttctcagagaaaatccagctattttgaatgaaattcccttccctgtaagacaaacaactattttgcccccattaaaagaagttccagttatttcagcagaaagtgctcaccattggaaagaaacccttaatgtttctctagaatctcatttttcatcaacagaaacaaatgttgtctcga

SEQ ID NO: 76970 - DNA, 465 bp, Oryza sativa
  unsure (1)..(465): unsure at all n locations
ctaagcttacataaatggctcttcnaagaatttctacgattatcgaaaattaacatcattttgatcattcacatattccttaatgtaagtgtcatcattntctttttttcgaaaaaaacgttctttnttttcaaaaagagaaacgttcggcgtattctacctaactccacagggtgatgagttagccattctaaatttgaagccttaccccttctatttatttgatattaggtccttccctaatatttatgttttttctcaaattatacatctatacaaattattaaaaatataatcatatataatcatatgaagctnttttaatgacaaatctactaatgccattttcacctattaaatataaatattttttattattgatttaacaagtgagatntgaccgtacataacgtcatctgtttgagagcaaacatacgaactatttgagctgatctagagtatcat

SEQ ID NO: 76971 - DNA, 470 bp, Oryza sativa
ggatcttaagtcacgcagctgcaacttccaaaggagccctgagggaaatacttttcttttaggatcttagaaaccaagttatttggattttcaataattctccaagcacattgaataagaagactttttttaacagttagtaaatatctgattcccaaacctccttgatcaaaaggtttacaaatgtcagaccaagatttccaacaaataccttttttactgtcttcatcattggtacctgtccaccagaatttcctgataatggcagttaatttatattagaagtttttggagtgtaaaatggtagacatatagaaaatagggatggaagcaaacacagaatttattaaagaaagtctaccagcatgggataaagtttttgctttaataatcgacagccgtgctttgaatttttcaatgataaagttgtaggcagagtttctggctttagtacttagaatgagacgatg

SEQ ID NO: 76972 - DNA, 436 bp, Oryza sativa
  unsure (1)..(436): unsure at all n locations
tctataagaagctgatattgtcaagagggcctatnaatagttctgtcgggcggattatgtcttgtgcctaaaataaccagcatcgtcaactcatattattctttttctctaccgagatttgctcatggctttatcttgttaggctccaatagttctctcagatttcttcataactagataggtgtgagattccttttatctgtgtttcacaaactctgttctatttatcggataaccataaaatactctaaagtaaagtgctacaccaataaatctgtgttttcttggatacattttgtgagggcataagaaataccaacaataaaccaaatcacaagtaatacttgcagttgtctccttttgaattgatgtcttataagtagaatatattatgacaatagaacaaatgcagcgtatgtagattggtaggttcatg

SEQ ID NO: 76973 - DNA, 198 bp, Oryza sativa
gcaatggcagcggatgctctcctccgagctcccaccctgccgattatttgactgctctgctttctttcttgggggaggagaggagcatatgctgcggagtcttctggaccgcccgatgcgggatcaacggcgcgataaaagtgagggagttgcgaaacgacgtatttagagggaatacgttttcagaatcgtatggcg

SEQ ID NO: 76974 - DNA, 426 bp, Oryza sativa
  unsure (1)..(426): unsure at all n locations
catgcaagctgggngcattgngctttantaactagtttcttttgctcagaaccatgatngggntgtgctagctagctgaaggaaaaaggctacttcattaccatcacgaggcaactcatgttgctctggccattcaactagggctaacaaataaccttccctttggactgctacatcacacttcaaggtgttttatcatgatgtattttgaatgttttaggaaggccttgttctcagagagacaattttagggacgtcgataatgataatggggaacattataatctcatcccatgcatctttttttgcccttgtcctacttgttttcatggataaaatagttttaacatttccatctcacccagctgactgttatattgcgaggacttccttagagcatgttgcttaaactaatgtgttctttat

SEQ ID NO: 76975 - DNA, 195 bp, Oryza sativa
gctctggtccctagcaaatgctggcagcgagtcctttattttatatgtgcaaagtaagaaggtgcatcatacgagattaagatagccgtccaatatatcaataaacattgtatcttgctctttatgaactattggctgcgttcatttgtctgtgttctcaacaccctcttgtctttgcgcgcatgctgtttatat

SEQ ID NO: 76976 - DNA, 462 bp, Oryza sativa
  unsure (1)..(462): unsure at all n locations
catgcaagctngtatcgcaccgcgtatacagntggttattaatggctgttaggcctgtgcttgagagtgcatgcggtgatgactgtgtccatgcttcgtcttgcattttccagttgctatatgcagacgaaattaaccggttgctatatgcagacgaaattaaccggaacgctgattacgctagaacagggacgatcatgtatggggctgatgagctatacatttctgctcccgcctctgaaatccttcagaatttgacggtcacttcgtgttaattttccctcaatccagactttatataaggcagctactactgacgcaaagacttttcatttgaatcacctcaataaatacaatatacaatgtacacatttaagattagagaccctcatttagatcatgcttataaacaatgtacacaccagaattagagatcttcaagatgacggatttaaaaaaacg

SEQ ID NO: 76977 - DNA, 488 bp, Oryza sativa
  unsure (1)..(488): unsure at all n locations
tgagttgtgcaactgcatttacgaatgtcacacaggaagatgttgtatcacgattcgccattgttacacgcttgcacgacgggcgcccgggtgaagagaatcagtccatacgcacgccctgtgcccgtgtcacattcggcgtgtgaggccgataaggtatgtttgggttgcgtttgtaatgaggacatgcttttcctcaatacaccaccatatagcctcatggaccaacgtgtgctctcatcactctctagcacgcccacatggatccttttgttggaaaattcagagttntctaaagcaacacagatattgtcttcagtcgtgctttggttgttattacgccatcaacttgctagtgtgtagagcttcagcttgaagtaagaacaaggttaatagtctagccaactactaactccaaatcattagtagccaattatataatagtaggtactatctattaaatctgacatactatcatcacacgtaca

SEQ ID NO: 76978 - DNA, 446 bp, Oryza sativa
  unsure (1)..(446): unsure at all n locations
agcttcttganatatttgtaatgctaagtttttctaccacaacagttctgtcaattatctcagctataagatcatctggggctatcacaaacttggtacaatttgtagagagtgatcatcaggagagccgtgctgcttccataaagctgctgtgcaaaatctcatttgacatggaccatgagatagcacaagtcctccgaagtagtcctacattgcttggatgcttagttaggattgtcagtgaaaatgatgcaaatgcagatgagcaagatgctgcacttcagattctggcaaatcttcctaaaagggacagacgtcttaccatggagctcatggagcaaggggctctcaaatatattgcgcgcaaagttttaaacatatgtagaagaggaactgccaataacatagttgataacacgatgctngaagggcttgtaaaagttctt

SEQ ID NO: 76979 - DNA, 419 bp, Oryza sativa
  unsure (1)..(419): unsure at all n locations
ctcagcttctctctctcgcctcgatttacccgaatgcgcttttttattcaggatggccgggagaagtggggattgtgcggtggatacgggaaagatttgatgcacttttcgaaggtggatttgagtggagtggtgaaccctagttcgccggcgcagttctgcactgtagcaagaagtggggaaaatggcgagagttccggcggtgaagacgaagcgtcgcttggatctcggatttcttgttaagggtatcggaggtgcaaatgggcctaggcctgaacagtacttcagcccaatactttttacagcgtggcccattgtgttccttanggacttanagcatatttgctntggcaatattatgcgcacaatagtgttgcccaatgctgataaaatcccttttatgcgcgcatataattctt

SEQ ID NO: 76980 - DNA, 475 bp, Oryza sativa
  unsure (1)..(475): unsure at all n locations
attatatattttttacaatccaactttgttgttcttctaaggtagattttgatgaatcttcccatcctaggcccncttctcttgtgccagtgactaacgcccttcacctctcttagtcatgccactaatttgctttggcaaccactgctcctatcacccactccctttcgccggtggtttttctcacctttcttccacaccatacatcatattatggtttcccttgccctctangatggaattcatgcagtggttcttccaaagaacaaccaacgagcgttgctggtgggaatcatcgatctagagggatgaattagtcgggtgctatgctattaacccataacanagaacaggttgtctactntgtggatggaactctgcaatcctagtcacttgtcttgttgcatatgttgacatacccagacatcatagtcgccataacccttgcttnctctgatatttcctatgactaaca

SEQ ID NO: 76981 - DNA, 438 bp, Oryza sativa
  unsure (1)..(438): unsure at all n locations
caagcttcctgatctgttaatttctctttcacagnattgggatcgtttgatcgatttccttgatcgctacttatgggcgtgcgctcaaaggatacaaacagggattcgcaaacaaaaaggggaattcgtagtcactttttcctgtcgcgtaaaaaaaaggctttacgcgagagcaatagaggttgggatacatctatctcttctgagcaacctcttttggattcttaagaccacccttgcagtaggataccgtctgctttgggttctttattatattatctccttcgagggatttttaggatcgttcaggctatatttagtctattntggcttttactgtctccttttctcagggaagtggttaaggacctcagaagatagaggagagcgccaggcgcagatttccggaatacttctacggngaatgctcattgaatg

SEQ ID NO: 76982 - DNA, 401 bp, Oryza sativa
  unsure (1)..(401): unsure at all n locations
tatcatanaggggcttcgacaagggggtntattcgttctttgttcanaaagataaagatcggatagattcgaaccgcaattgcaaaggtaatcactactatgccagcccaaatcatgatcttcaccaacttggatttggttctctcgcgaaaatcgcgagttgcagagatgagaaccatgaaaagcaagatcccgaataagaaaacagaaaccgaggaaaccacaagagtgaagactagtagagtctcgtcttttgtcattctttgctcctttttcactcaatgattcattcgaatttcccgaccaaaaattctatatgtctattcatagggcctcgntgctaagtgctacaagatctagtgcactggaactcgtggttatggacccgaatcctttagtat

SEQ ID NO: 76983 - DNA, 404 bp, Oryza sativa
  unsure (1)..(404): unsure at all n locations
agcttagctatgcatgttctattaggacgtgggccggcggttggccttttgcaaccctaccaccgctggagctcaccaaggaaaattaaccggnggggaccatggggttttccgttgcggggagacgtgtcgcgcgaggcaggcagctagcggcggtggatggctggatagcctggatgcangtggtgggggcgtgggaagcctggactggaaggccgttgcggttgggcggggggaacgggacggatgaggaggggctttgcacatgccggcacatggtggacttggccttgccgaacggctgcctgctagtgccagactgatcgtctaccgtaacgtacgcttgtgtaatggcggccgcctggcacctcgcctgctgcagctacctgctgctggtccaacac

SEQ ID NO: 76984 - DNA, 450 bp, Oryza sativa
  unsure (1)..(450): unsure at all n locations
agctgtttctttgtttatcttggccgnttttccctcttatgttcagtggcaatgcgccatttggtcagacaggcaactgaacaacccaatagaaatgctatagccagataacttaaacaaataaagtaattgtcacatctagatccaaagatttgttattgcttttttttttcacatctagtacatcatacaactggacaaagtcagatctgttcctgatatggaaaatacaatctcaactccaaaaccttctcctgcccagatgttgagcacccagaaatgctgaaaaggattctctaccaagaacagaaaggtagtagcttctcttcagtaagcaaaataagggcccctttgaatcgtaggaatgaaaaaacagaggaatagaanaaacacaggattctgacaggaatacaattgtaaaacagaggattgcnaacacaggaaaaacac

SEQ ID NO: 76985 - DNA, 407 bp, Oryza sativa
  unsure (1)..(407): unsure at all n locations
agctngaaatcattacttattttgtgcccctgtgtccaccaactacagttaggaattacctgagagcacactaactctcctccatcagcaatttggactttcaagggtttagtcaacaattttaccccagacatagatttcccaattttctcatcaataaaagagtgggagcttcccgaatcaattaacatcaatagttcagtcccttgtatccaccccctaagtctgatggagttgcgtgactcaattccatttaacgcttgctgagatatggccataacaatgatatcttccctttctggtgaactttcagtaagtgagtccttccctgaatccccctggtaaacttccaacaactcttgacaacatgccattggacctgaagtgcacactatgggctctcccca

SEQ ID NO: 76986 - DNA, 480 bp, Oryza sativa
tgaccccggccagccggataaactgctggatctctttattagctgaaacaattgtacagtttctttctttggaatcataatttgttagctgtgttatgctactgtcaatccgctactaatgctgcaattagacatatttgatctattaaccaactacttattttagctatgtgctatgtatatcaatgcattaggcctgaagttttgctaatcaactactagatgtgtttttttaagctactcactctgtctcaaaatatgttacttctaagattcaagagtaaattgcacccacgatacaacaacttagcaggtgggtgcaatatagtgcaagaaacttatgaataaacgtccgagtgcaacaacttgacaagtgggtgcgttctagtacaagaacttaataatttagtattttattgaatcaatctagctaagcatatgctagatgagattttcacgatgtcagatgccaaacacact

SEQ ID NO: 76987 - DNA, 441 bp, Oryza sativa
  unsure (1)..(441): unsure at all n locations
tgcaagcttgttattatgatagtatgaagnaacagttctggtatcttgttttaaacattgcagtttgttgaacaaaatgtcagcataatacatgggaacataaacatctctgaaatatcgtttcaggtctttccaagattgtggtattttgttatgcctacaaagatgtttccaatcattagaagcatgtttaattaaaacactagaggcacacataaccttttgtttctccgacaagacatgcttttgaaattcactatcaaccgctagctcccaattaatgtaagcacgaggatcatagtctccctcgaaataaggcagtgcagatttgatcttacctagaacatcatcacttacctcataatggtcatgttgatccctcctcatgtctcgacgaagatgtcgatgttgagcacagctatccccaattatcttgcgtat

SEQ ID NO: 76988 - DNA, 484 bp, Oryza sativa
  unsure (1)..(484): unsure at all n locations
ngacttggtgcgaggaggctggtttagcgatgtctgccttgtctaaccaaaggaaggagcttctttggcatatacccatggacaattcanggcatagtgtccttgttctctacaatcatgacaaaaggggacatgctcttctggcattggaagctcattgacctgngtggcaaatgctcgatcaaacacacactgattttggtcttgacttccaaccaatggtagctgtgaactaagcagcatgcttggaatggaccaagggtgtgcccttgttaactctcttgaggctagtggtggattgagttgaaaacttgagttactggaggcataccctctgacattctttcctttttctctgttaaacatctgttacagggatngaggtgagagaggaaacangctatgaaagaatagaccagaactagagacaggaccttaaaggaactaactcctcttgttgatgtgtnngttgtttcacttattc

SEQ ID NO: 76989 - DNA, 433 bp, Oryza sativa
  unsure (1)..(433): unsure at all n locations
catgcaagctggcatacaacaaatacaactaagagctttcccaaattattactaacataaagtgcaaatcttgttactgttctatataagattttccagcaggtagctgtgtagtttaagtgtaagtagacgaagacaaaactgtatcagaaatactaagagttaagagtacctgtatagtgacaagagccaactgtccagggtaacttgaaacaattgatcgaaatgtggatgttgcatttgttgaaacaaaatatctgacagaaagaaacacctgcgtcattaatgctaattgccaaaatatagaagccaaaaagtccaaaacaaaattacaagagtaccagattaattcatatagtggttagaaataaataaaaagatttctcagaagaaccttatatttaaggattacgaactgcaagcangaacatac

SEQ ID NO: 76990 - DNA, 489 bp, Oryza sativa
  unsure (1)..(489): unsure at all n locations
tcggcttcatacaactgcaggtacatccaccatccgccttcaatacacattcctgcacggcttgtttgcgatagataccacgcctgctcctatcaacacacattatttcataccgatgcacttgtgtgccttgagcaacaactctatgtctccgtgcctttntgattttatcttccatgtactttgtcactacgttgccaaacactatgttgttatcggccatggacggaccaattttcttgtatcgatccctaaagtaggcttgcgtgccgtgaaggatgaattcaacaatagcaaccaatggaagtacccgaactcctcgcattacccagttgtacacctctgccaaattggttgtcattatgccataccgagatccatcggtgtcgaacaatagagaccacttctccttaggctcattctcaatccactggactgaaattctgatggacgaccctgacctccttctcattggtggtgggtcatcat

SEQ ID NO: 76991 - DNA, 420 bp, Oryza sativa
  unsure (1)..(420): unsure at all n locations
catgcaagctntctccaccttnttccagtataaaaatatatataccggtacttataatcacttattggtattggtttggaacaaaagtcagcaccaataatctatcaaatcataggtgtcggtttctatcaagctataacaaactggtacatacctataaacaacacataagtgtcgatgattcttataataaaatggcacctctataagcatatgtactggttnttatcatgaaccgttacttataggcatcatatatgtgttggttcttaataaaaactatacttataggcatcatatatgtgttgattcttaataaaaactagtacttatgagctcatagatgttggtttacaactaanatcggcaccaataatgacacaatattttctatctaacattttcatatnaagttggatg

SEQ ID NO: 76992 - DNA, 432 bp, Oryza sativa
  unsure (1)..(432): unsure at all n locations
nggctntcgctcaggatccttgataggattgaatcccttttatctgaagtatgcttgaaggtcatcgtgctgttactgcattatgttgntgaagttggtaaattgagcatcggcagattgttgccattcttgcgtttgtgctatgtgttccgtgaggttgtactggatctcccccgtctgcacatcaaaggtatccattctcgtagtgatttcacccaagtcccaacaagaggaacacgagcacaattcacttagagatggaggcacaccacttgatctgggaggttggtcgtccccccattgtatgtcatgaggcgcacgccatcggtcctcactggcacttgcccagcttgagactccgatgctgtagcgtggagcttgggtccatccnggtgcatccccagttggttcccaacctgtctcacgggtgtt

SEQ ID NO: 76993 - DNA, 457 bp, Oryza sativa
  unsure (1)..(457): unsure at all n locations
tgcaagcttccagaacttctattactntccccattcttaccataggacatatgaccagccgtctgattgcaaattaaaacagcattgtcagaattagtagcatccccattttgtcttgagtcggtgtggacaattacattccgagtttctctttctttgttagtacagtgattagtatcaccacgacaccctggtttagaagtactgtctgtagccaagtgcatttcctcattacccacatccttatacaaggtaccatgtccattaatactgccatttgtagcagaagcagattttctggtcactgaactaccattctcgtcacaagtactatttggcaagtaagagcacctccggaagggaacaccatcagcattgttgcccgagaacttgtttacagtgttaacaatggttcccatgaaagcagctccaagtagttgccttccacaaactattc

SEQ ID NO: 76994 - DNA, 410 bp, Oryza sativa
  unsure (1)..(410): unsure at all n locations
tctaactagtaactgggtttgctaggcaaatctgtgagttgattatgattttaaggaacatatactctttgagcaagtttatggccaatttagtaaaaatctcacatcttattaacattcttaaggggatatttttgtgacagacattatattggattatagaaggaatcaaagagatgctagccatgacctttcttctcaggaggtgatgcttcccttttaccagtgacaatttctactttatgaactacaaactgaggtggagatgcagcagtagcttcccttcctacttcaactaccaactgcactaaaggatccaagctagaaaaaatttcttccttggagatatcatgatctatatacttggatngaactgagttcaaatcaatgctaccacacctaacattaac

SEQ ID NO: 76995 - DNA, 446 bp, Oryza sativa
  unsure (1)..(446): unsure at all n locations
agctggatggagcaaaatccgattgataattcatcggtcacttgngatactatttcggttataccttttgctaagaccagaattgttagtaatcctctccctattagtcctattgatttagataacgagaaagtagtgattcggcctagtcaagccgaatccacaaaagggaaatgtgttattattggggatcttcggcctaagactaggatcaataatacaaaagccgacgatcataaagttgtaaaggatgagtcatctagtttccaaaagaccaaaaagctgaacctcacttttgagatgcttatggctaagtacaagaaaggattagctggtcaacaattcgataatcagactagtgatttgaaaagaccaagatcatatcgtaggaagagatttggtcaaacaccaaagcaatcggagccatcaactataccaactccata

SEQ ID NO: 76996 - DNA, 452 bp, Oryza sativa
  unsure (1)..(452): unsure at all n locations
tgaccatggactacttagaactccaaatatatggaacctttcttccaactactgaattntccatctatttctctttgcagatataacgaattagtactcataaccatatatagtgatacagtcagagcctgcaccaaatacagagattactccgactctccgatatggttaaattatatactgtatgctcttaaagaaacatccaagcatgaactgaactttcatttttgacttccgaattagacaaacattatacaggaaaacgactatgttcaattaaaacgatgtgcatgctccatgcagccaaataaaatttcagaagataagaacagtgttatcttangggattattcaacctttctcaattttgtggcacagaaaccaattcggtagtcatgggtgactgcaannatgaaactcaacagatcattngatatatatgcttgatctga

SEQ ID NO: 76997 - DNA, 382 bp, Oryza sativa
  unsure (1)..(382): unsure at all n locations
catgcaagcttntcaagctcaagtatttactttncttatttatagatcagcgtcttggagctaatgtgggatctgcccaaggacccacaggtttaggtaaatatctaatgcgttccccaaccggagaggttatttttggaggggaaactatgcgtttttgggaccttcgtgctccatggttagaacctctaaggggccccaacggtttggacttgagtaggttgaaaaaagacatacaaccttggcaagaacgacgttcggcagaatatatgacccatgctcctttangctctttaaattctgtgggtggcgtagctaccgacatcaatgcagttaattatgtttctcctagaagatggttagcgacttcccattttgttct

SEQ ID NO: 76998 - DNA, 479 bp, Oryza sativa
  unsure (1)..(479): unsure at all n locations
tctggcccagtaggtccataaaactcactcggattagctgtattattgaaccagacaaaacaacaagcgataaaaccaaagacagataaagcgcctaaactataagacaagtaagcttctccagaccatacaaatgcacggcgagcccatgcgaagggtttggttaagatatgccaaattccgccaaatacacaaatgaaacccaaccatacatgtcccccaattatatcttctaaatcatccacactaacaatccaaccctctcccccaaaaggggattntagtaaataaccaaatataacaccggngctaaggggtcaaatggtaatttttcttacatctcctcccccaggagcccaggtatcatatataccgccaaaataaagagctttgagtactagaagaanagcacctatacctaacannaataggtgaatacccaaaantgtagtcattntatttctatctnttcacacata

SEQ ID NO: 76999 - DNA, 166 bp, Oryza sativa
  unsure (1)..(166): unsure at all n locations
agctngcattanacacctaagttcccgtgacttgctgagtacgaaagtactcaccattgctctatataaatatatatatatatatagttcctccgccctgaagagaagataaagtgaagtgaagattagggtttcgttctgtgtcccagccgtcggctgtggtggt

SEQ ID NO: 77000 - DNA, 226 bp, Oryza sativa
  unsure (1)..(226): unsure at all n locations
tgcacatgaggcactcaccaagaattgtgaatagtcaaatttgtaatcatggaagctagaagattcaccggcanacagaaatccttgaaagctcaatcaacttcaaccaccatagcagtgcagtgcaccatacagactaaaagcaaaggaaagaaaaatctactgactgaacaatgtcactgaggccaactttttgctgatcatggatatggaatggatcttatgg

SEQ ID NO: 77001 - DNA, 435 bp, Oryza sativa
  unsure (1)..(435): unsure at all n locations
agctnttcatgcttctgttcttgtgggccattctgggattgctgctacttatcatcggattaagaaattatttgcttggcctggtctcaagttggatgttgaaaattttgtgaagcaatgtcaggtttgccaacaggccaaacatgaacactgtcggcttcctggactgttagctcctctcccaattccaaaagaggcctgncaggacatctccatggattttattgaaggtttaccgcgctctgatggctataatgcaattttggtggtggtggatcgttttactaagtatgcgaatttcattcctttgcgtcatccattcactgcatcacaagtggctcatctggtggacaaaactgtatttaaaactcatggcatccctcgttctattgtgtctgatcgtgatcgtctctttactagcangttctggacaac

SEQ ID NO: 77002 - DNA, 413 bp, Oryza sativa
tggcatagagtcgtacgcacgttaggtttgttattatgcaatttgaagctttgaaccataccaaaatttccacacttccaatggagctttgtggcctttgctatctgagtatctgaccagaccaccttgtcttgccagaattttggcaaagattctatacggtagcaaactaaaatatcctacctttttttaagaggaaaggtttatagcccgaagagggactctaatcacctgaatggatgtccacttgtttatcacatatcgattaaatgataataaattaataataaaagtttgataaaatagactaatatgcaacatatcactttataaatatgcaaattaaaattcgacttctacaagttgtaacaaaaataataagataaatttaactagtatatgtacatatccta

SEQ ID NO: 77003 - DNA, 391 bp, Oryza sativa
  unsure (1)..(391): unsure at all n locations
agcttgttatggcggatttgtttctctgaattagnacttacatctttatgatactctaatcctttctatgtgtgttggtatttcttacgaccacaaataaatccgcaagcgcacggaataccgctgtagcacttcaccttcagatgaccccaaaaggatattgaactcagggaacatatgtaatctacctaaggctaagactatccaaggataacaactgatggtaagcaggctaggctagagaggactttctatgtgttttaattatctaagctaagtaaaggtcattccctatctgttgcttcgggcaccgacccctgctggtctgccagcgtggttccggctatagctctatgatatgcctgaatgtggaggattactangacgggat

SEQ ID NO: 77004 - DNA, 401 bp, Oryza sativa
tagtgctggtggagatctgcgtggactccaattgttcatatctttctattgtcacctgcaaatctgtatcaagtccttctgtgtgctgcttcacttgccttgtaaagtattggatgatgcctttggtgcgtggggaatgagatgcaccctcctcatctttatcctctggacctgccatgggttataaatgaaggacaacaaaacaatggaggatgtaatgtaagccctacacaactattgggatgtagcttttgcaagacgctcactctcacttcacttgcagcttgtctcacaagctcttaccagttcttaccttgcccacaggagggggacagcaacccacaagttagcaactgtggagcgaggtgtatcggtgctgatctacaagacctgtcagctgt

SEQ ID NO: 77005 - DNA, 423 bp, Oryza sativa
  unsure (1)..(423): unsure at all n locations
agcttgttttgtttggtgaagngagaatgggagctcaatttataggcaggtaatggtggttataactatgtgaattgtaggaattgccctacaaccaccatcaggagaccatctagaacgtccattacaaaacctggattcaacggtgatcaccagggttcagccgaacctgggctgggcccccaaatttggtctgggcctcctcgctgctctgccttatccatttattcggtagttgggcccatgttctgatgttttgatggagtttaggagcccagctcttgtatggatagaattcttcttcacttaagtctaaatttcctcccaactttggtggtttatcacctgcatccaaatatacacgagaaatgttagaattaaaccctaccactatgtttgatgtattattaactatgttttatg

SEQ ID NO: 77006 - DNA, 490 bp, Oryza sativa
  unsure (1)..(490): unsure at all n locations
tggatttcatcctaatctaatgccctacctttttaattatttgtcggattgttgaaacggattatttactcaagctctaaaaatacattttctataaaaactttcttctgtaattatattgctaagaacatctattttatattatttattaagtttatttattatgatatttaatttatctctactattaaataaataatgatagcaacaatccgctcaaccatgtctcgatttgggtagaaatgcggtgggttttcattctgcttaatgccctttgcgggacatttaaggctgtgtttagatctaaagtttggatctaaatttcagtccttttccatcacatcaacctgtcatacacacacaactnttcagtcacatcatcttcaatttcaatcaagatctaaactttgcgctgaactaaacacacaacttttgccactntaagatgtgacgaattattatttgtcactcgctgtctatgatatatgag

SEQ ID NO: 77007 - DNA, 324 bp, Oryza sativa
gaatatattcccacttaatctggaggacttatgtatataatcactaaaattttaaggggtggctttgcttgtcacaaaagtcattttccacaggtaggggcatgtaacttcaattcaacatctcaaatagaaaccgagaaatgtacacttaaatctactaaaagagccatggaaaaagcagaactccaaaacacgagtctgatcatatgtaactatcatgctgactgctgagagagaaagaacaagtgaataacagagacataaagttacaaatatctactcgttcttttatttaagctaaaaatgctacatatatctttcctt

SEQ ID NO: 77008 - DNA, 406 bp, Oryza sativa
  unsure (1)..(406): unsure at all n locations
tgtcagggaacattgagttggacctcattgaaacagatatatctggagggtcttggtgatctgcccaacttatgctatgttaggttcagaaacaagggatacacagatggcaagctcaccttcattcagcaaaaattcaaaaatctcaagtactttcttgtcgagggcaaaaacatgagaggcatcaaatttcagaaaggagcagctccaaggctcgagaagattgtattgtccttcaccaacatagagtctcttgatggagtcggggaccttccaagactggaagagctcgagttgaagagaaacagattccttctttcattatctgaagtgggagaaactctngagaaatacatgctcaccttcaagaaaggatgaatccaacatctatagtacttacttgctg

SEQ ID NO: 77009 - DNA, 390 bp, Oryza sativa
  unsure (1)..(390): unsure at all n locations
gagatgcagctaaatgcaaaagcttatcacatcantacagatgctatcttatccactacatattaaagatgcacatatcatcatccanaacaagatgcacatcgtttccattaacgattattacatttatacatcatgcaatatgccatattatctatattttaaattaattaaatatagacttttaaatacaagcatgtaaatcgtcatcccacgtaattcacataatatttcaatatatctcttcttattgtataaacctacatacctaagttcatctactaataatgtattttctcattattaacctatacataattgtttagattaaagataatcatggccaatatctcatatttctttctataagctatactcaatgtttagtct

SEQ ID NO: 77010 - DNA, 377 bp, Oryza sativa
cgctctggaaacgacgaccgggttcgccagctctctttgatggatgttctcacggatgaatgcggcctccagaagtcgcgccacctcctcgcggatgaaggcttgacgttccggtgcctgccgtcgcactttctgccggaccggccttgcgctcggccgcacggcgagacggtgctcaatcacctccctggggaccccgggcatgtccgtcggtctccaggcgaagacgtctgcgtttgcccgcaagaaggagacgagcgcgtctttctatttgtcgtccagaagaccaccgattcgtgtggtcttggactggccgtcgcctatggcaacctccttgaccgggacctcgtcacacgtgaccatttgctgccttgggg

SEQ ID NO: 77011 - DNA, 332 bp, Oryza sativa
atgtttaacacaactatttactcacctcacgtgtctcattaacaaatggatgataaaatagttaaacgctaaatgtaagggtggcaaataattatatgcggccttggtgtcagcccgtaaagactatcaggcccaggttgaggttgaaggcccacatgtgctaaatggactgggccgtaatacgtatgtgggcctagttgcaacggctagtaagtggcgtgtataccgaaacgggaggcgaagcgagcggcgcctctgaacgggacaacggtcatattaccgaccgttgtactcctccacccacgaacgaacgaacggctacgcacttgcgt

SEQ ID NO: 77012 - DNA, 432 bp, Oryza sativa
  unsure (1)..(432): unsure at all n locations
acggacctatgatactaagcttctgccaaataaccaaccccgttgaggaatgttnttctgtttctctggattatctttcatcatgaatcctgcatntttgtaaagaataggccaattagaccccaagtaaagacacaaatgcatgatattaaaatgtctactgacatgataaaaatgactattcatcatgtattcatgttaaagataggatattccttgaaaatatgttaacgctacacacaacatctgttaggtaactntctttttttttgcatatntaataactattaaaaaggaacatagtgttgccatgttcatgtctggaaatttaagcatanggttccaaaaaggaaacaatttggaaatgggctaaacgtacatatcctcttaacagtgatgcttagcaatggaatcagcggntcagcagtagta

SEQ ID NO: 77013 - DNA, 414 bp, Oryza sativa
agcttgggagtgaagggagatgggtggcctttattttcacttgtcacccatggaagagaaaaaatgaaaaagagatggaagatgagagtgaaagagaggagaaagaaatttattggaaagtgaaggttggtgcctcactctcttcatgccaagaaaagggctttcaggacaaagtaggggtcctgctagggtttttaggggttaaggctgttgatagtactccatcactagcttagatctgtgtgtgatcaacaaacactgaagaaatgtgatgtccatttggctgactgcatgatcttgacaaactgcttttgctctggatttgaaaggctatgtttgtaatgtagtagcaaggtgcaggaagtgcatgcttgccctttctttttttctcttattttcatgccactcactcag

SEQ ID NO: 77014 - DNA, 403 bp, Oryza sativa
  unsure (1)..(403): unsure at all n locations
gttttntttctccttataaaaagcggtgtttattcgattttcatggtcatgnttttcatatttgtgatgtctctagttgtacaaattatataaattccgttgctctcttgaagccatttatttattgcatgtacggtaaaattgaaaaaaaaactgttcatatcacttccatttcgctatcaaaagtcaatgtttcgcatgtggttcaattcattcatcagttaaatggtctccagtgaagcactgattactctactatttaattgatagggaatgttaattaactttgttagtttcaattctcggaaaataatttctctacagcagcattaagattaccttgnttgtaatctaaatacacagtatgtaaaatatatatgcagctagtctggatatgacagta

SEQ ID NO: 77015 - DNA, 185 bp, Oryza sativa
agcttagccacgaacagctgctggattacttcattgatctctcttttgagagttgagactcgctgaaggttctctaggactccttttgtaccgagaacataatatagaaatcataaccctccttccaaagggaaacattgtacattaaatagaaggaaaatcaaaaaacaattttacggtcttta

SEQ ID NO: 77016 - DNA, 366 bp, Oryza sativa
  unsure (1)..(366): unsure at all n locations
gcttcttatganattcccataacannaaanatgtctacatctttgtttaatatttggcaatcaagatatctttgttttttcttaatcttttttcttttggtctatggtgccaattcaaaaacaggcttccgtggttaattgataaaaaaaatgtaaactgttgcgcatagcggactttntagttggaggtgatttttactagtagtatcttttattaatactatttaatacagagtaggttgcaaataatgtggtttgctacaacatagcagcagagagntttgtagcatacacagaattgggccaagtagtattgtcaaattcagtgtacacaaacttgggcatgagcattgtttgaagttagta

SEQ ID NO: 77017 - DNA, 383 bp, Oryza sativa
  unsure (1)..(383): unsure at all n locations
acctgcggcatgcaagcttgtcgattgaaggatggagaactattttactctganaaccaaaccctccctccctctgaaatcgcccggaaaaagaagagatgatcaatccgtctcttgctagggattcgaacaaaaaaaatcaaagcagcagcagcagcagcagcagcaagtgcagagaatcacagagaaagcaaaacaccccaagtgtgctacaaagatttctcccacagcatcacaccgagatgctactaactcctcccatgaactgcaaattttctggatatattaaaaaagaagaaaaaaagaccagaaaagaatgcagctcctccaagaaaccctcagcaagagattgagagggccagtgagcttgacaagggacccta

SEQ ID NO: 77018 - DNA, 289 bp, Oryza sativa
  unsure (1)..(289): unsure at all n locations
ttctagcacgctaatattatatgcattcggcatatgtatgtcttattgaagactcttgntngatgggatagcttattacatactttacactctgccactngccacttactgcgtggaatttattaattcagctcactcatatatggcttgctatatatgtatgcatgcatgcatctcgatttgaatataggatgcgattgtatgcgttcataaagtgaatttcacgcggtatgtataataaataattaacaaaaactgctatacctatataatatattttttttgagaa

SEQ ID NO: 77019 - DNA, 445 bp, Oryza sativa
  unsure (1)..(445): unsure at all n locations
catgcaagcttatgaaatggggattttattaggaattgcttattnggancctactggatggaggcccatcccgagcatttttggagacagatgtggacttgatgcatcaagatcttgctatgatcaaggtaagaatgagatttgagagtgcattgtaattattatcgagtgaagaaagaagcaaaagtctctttatgtatccagcatattttatatttttcaacatgttgatatctcggcgaaccttaacactgtaacaagatttatttgccttgactggtgattttcttctaggatctctttatagctgaaggccaaggtttaccattggatttagttgaaaaggaggctagactaactcatcaaatactagacctatttgtgtaaaggatgctattctttctctttgttttgcagaaaaaaagttctgcagtaccactaaatg

SEQ ID NO: 77020 - DNA, 466 bp, Oryza sativa
ctcaagcttcaggtaaagttcggcacgcaggagaattaacttactgttctgtagctaaggaattagctagaaaatagctactacaagtattatatatatatatacccttgaaagatcatccggaagagtggaatgcattttgctctggactgaggacagaaattcatatttcttcttcttcttttggcgtatgctacatgcatgttcaaacatagtggtgacataaaaagttttcctgatataagacatggaaaacttcagataagagacaggaataaatggcttcggcctgttcactcaaattattcctcgttataccagcataagctagccgttcttttctacactgaggtagcggtcaattcctgaagttgattggtaaattcttctgaagttatgaacaagcagtattgatacatatacatcacctggtagtgtactagtagtctgtactcagtactacttt

SEQ ID NO: 77021 - DNA, 448 bp, Oryza sativa
  unsure (1)..(448): unsure at all n locations
agcttcacaatagaaattatagaaatgacacatgacctgcaaagcaaacattgctatcttctggaccctcttgtagtccaatattgcataggagcttgctatcattgcctacaaatgcaagtaaacttaagtctgaacattttgattgcacaaatcatgatatatcattgagctagaggaacaatctttgtattagtagtattcgctagaagtttgagggctcgatgtaaattacaatttataaagaaagaagtatgtgaaatgaagccgatttaaaagtgtggataccatgtacaatcaaagatacacacctgggcagaaacagctaaagcatctgcaagcaaagataccgcaagccatacttgtaagcatatctgatgagctgccatagctgttgggccttgtcgagcagccattgatgtccctatggtcatcgntaataaaatcg

SEQ ID NO: 77022 - DNA, 478 bp, Oryza sativa
  unsure (1)..(478): unsure at all n locations
agctagctagtagcttagntagggtctatctgaatggctatgcatgtattaatgatcatacatcttacctacttactactatgggcctgttcggctggccgatacagctacttcagctgcagacacaacacaatactatttatgttggctgcacaacagtgaaattaagtgcagccgaacagagccatataatatatgatatggatcaatgtcccaatcgtcgccactatcatattcttacctacttaatagaagtgaaccacacgtatatgtgcatatctacacctacacattattaacagagtttgaatatgagatgtcatgtntatattaaaaaaaaggcacatggtctatattaaaaactacaaatttttaatgaaaatagaagcgaagaaatatatatcaaactcacttcttaaaatgtacgctatntaaggtaaatagtggcgctagactacctcacaaaataaacctcccc

SEQ ID NO: 77023 - DNA, 416 bp, Oryza sativa
  unsure (1)..(416): unsure at all n locations
cagcaagcttgacagtttggtattgtgttnnttgagagaaaagaagaatctacttcaaccgatatgcccttaggcacggccatacataacatagaaatcacacgtggaaggggtgggcaattagctagagcagcaggtgctgtagcgaaactgattgcaaaagaaggtaaatcggccactttaagattaccatctggggaggtccgtttggtatcccaaaactgcttatcaacagtcggacaagtgggtaatgttggggtgaaccaaaaaagtttgggtagagccgggtctaagtgttggctaggtaaacgccccgtagtaagaggggtagttatgaaccctgtggaccacccccatgggggcggtgaagggaaagcccccattggtagaaaaaaacccacaaccccttgggggta

SEQ ID NO: 77024 - DNA, 353 bp, Oryza sativa
  unsure (1)..(353): unsure at all n locations
actcagcttttatcattctggcatcgagctattttgccgcatgaccttccctacagtatcggcaccgcagtagagtttaaccaccaaattcgggatggattggtgtggttcctctacgcctaagacaccagaatatcgaaccatgaacgaggaaaggcatgagagaaatattggctagtaattgtgaagccccaattcttgactggaagggacaccaaaggcctctgccctccctctctatctatccaagagatggaagggcagagcttttttttggttntttcatcttttcatcaaagagttgaacaatgaagatagatggcaagtgcctgatcgatttgatcaggtcgtgt

SEQ ID NO: 77025 - DNA, 405 bp, Oryza sativa
acctcagagtcacctgcggcatgcaagcttgacttcagcagctgtctactccactccacaggctatccttgacggcagcgacgaaaccaactttgacaaaacagctccaactaggaagatcttcagctctggtgtgggggaaaagagagcaagactgagtactacccactgtactcagcaagtcataccggaagaggaggtatgatgcaggatataaccaaaggaggctagaggttcttttgcataaagctagcatttaaaaacagtagttgaaggcagtaaaacagttgtagtaattaatcaatgttaaccaaacactgtccaacgctaccccacgttgcaacaggcccaaccaaccacctgaactacaccagttcattaagcttaactagggatgagacttat

SEQ ID NO: 77026 - DNA, 414 bp, Oryza sativa
  unsure (1)..(414): unsure at all n locations
tagtctattgattctcatgtggttgcttaaagtcgttctatctctgacaaccttgtctacctacctatttagcagtatatgactattctagcctgtatgaaatgcagactatgcaaccatattattgacttatacatggaaattgatattcgcgcactccatgtaaaanttgaatagtctatttacatgttttattctaaaacccttggacaaaaattatggaatagaaagggttagagctccataattccgtaaattattccgtgcatttgctaaaaaaatttcgcgtgatggaacacacatacaaatatctagttgacaaatacataagtccgatactaattangtaacatgaacagtaatctattgcctcttacacagttatgtgtgtcaccaatgatttgatcagtcttt

SEQ ID NO: 77027 - DNA, 433 bp, Oryza sativa
agcttatgtcttttctaatagtggcccaattggaacagtagtgttctgctaattgacattacgtacactactcacaagtggctgtgatcgatgcatctctgatctgcagttaatttgacgacaatttgattatatctctcttttatcattcactgttgcacggtcatggagctagctaggctctcgtcagcaagttaagctaaggttaatccatttgagttaaagcagctaactttaacggcgcaactgctcaagatttaataataagattggttgggtagtttgggtaaataagaaatatgcttatcatctatggctacatgtgatcatagtactagtgaatcatttagaccatgcatccatcagctcaaaaataacttaagtagatggtgtcagtaaactaaccctgctcatccaagtaggatggattatg

SEQ ID NO: 77028 - DNA, 359 bp, Oryza sativa
  unsure (1)..(359): unsure at all n locations
ntcagcaganagggtccatcttttgttggtcatcacccattctttctttaattctttttacttgccattgtcaatccacagcaggcaggtaggcaccaccatatgcattttttttggtattattttcttctcaaaaaaataaatgaatttgagattgggtagcattgagttatgtcgttcgagaaagatactactggtcatttcgtgtgccaaatttttttttaaaatacacggacacacatttaaagtattaaacgtagactaataacaaaacaaattacatattctgtctgtaaactgcgagacgaatttattaagctaattaatccgtcattagcaaatgtttactgtagcatcac

SEQ ID NO: 77029 - DNA, 417 bp, Oryza sativa
  unsure (1)..(417): unsure at all n locations
agctntatacctcttctgatcatggatttgataacagagacgtcttgacgaattcttgagatgtttgatgccatcttattctccacatggcgaggacttgccatggtgcccctggtaagaaaaaccttatatgaagcaattaattaatattatatgtttaaacggtagttaaatggtgcccctaactatatgtttaaaaagaccttatatgttacataaagccatgaagtattcaagacaaaggagaatatgagactaaaaactttcacaggcaaagcttgaatcagaacacacaagtcatgaagactacaggaggaacaaaagtttattgtatagattgcaaaaaacaatggaatccttaagtttaaatagctgcatttgtattgacatttatgtaatgatttcaagctgactaca

SEQ ID NO: 77030 - DNA, 404 bp, Oryza sativa
  unsure (1)..(404): unsure at all n locations
tgaccccttttattaatcaaagnttcatatttattattgaaccccatctagaccattgtgtctgctgaagggcaatatatattntattttctatataactcttttcctgaanataatattgtgcttcacattgaacaaccaatctacactgttgtacaattaagtggtgatgacctccagctcactcatgtgttggtctctgatggaccagccattngtgcatgctttgcattgcatgcattcatggaccacttcactagctgtagttagtacaaacatacaagaatgcattcangagctgtgtcactgngcctatgtggtcacaaagcatgaaaggttaagctacagtgatgctgatggtgagtgctgagagtaagtaagacactgtcattatatgctgatct

SEQ ID NO: 77031 - DNA, 456 bp, Oryza sativa
  unsure (1)..(456): unsure at all n locations
catgcaagcttcttccaagcatacggctttctatatgtatatgacgatctctagacagatggatcttatatgaatcgtatgatgaagtaccacatgagtggatatataggaaaggaatccaaatctgccgaatcgctcatgttatgatcttctacatcctaggtctccgcgttccgtcatctggcttatgttcttcatgtagcattcagatcgaatgactctatgaaattacgtcgatacttctacatattatgggtaacgtaggagacatccctattttcccccgggggtcttaattaccactgcttagctttcaattcgcctctgaccatcaaattaaatgtgaataacccgtcctcctctctttgaaacaaggggcgcttccggttctgtgcgtgcttcaaacaattntgtcttctccatattaccatatctctagagtcaataattttctat

SEQ ID NO: 77032 - DNA, 468 bp, Oryza sativa
  unsure (1)..(468): unsure at all n locations
ntaacaatntatggactagttgtggcactnggcgctttatttgcgaaccctcttgtttaatcctaaaaaagagaacgagtcctttagattagatactttcttctttctttagtaaataggtatttgcttctgcaattccaattatatcaatactttactcctaatttattactcctagagttttctatttatggggacagacaataccccaccccaggaatagctgatttgaggatgatcaatttagaggatatgttcgccgtcttgcttcccgccctttgtttagggcagtggaaagtatttttcctcttattntangaattttgggaacatttcaacaaaggaggtctttcacaggtcaaacgagatctaagacttaatctataagaaattactaaatngaatctatttctattaaaaaaaattgcattataaaaaccgatcaaaaagggcgagcgaagtaagtga

SEQ ID NO: 77033 - DNA, 429 bp, Oryza sativa
  unsure (1)..(429): unsure at all n locations
agctntatggtgtgattaggacatgtgacttttttttntcctggttaattacgataattacgacccttcagggttgtaatcttataattnttttctgctctatcaatagaacttcgcaccttctcgtacgagtcgttccaaaaaaaaaaggacgtgtgacttgacaacgacggtagcataggggttgacgaagacagctctgatggatctgccggtggtggaaggagggatcagttggccatcttagccgacatggacgatgcaatcgcgaaggactggggtggactcgatcaacatggcgtgatgctacggcacggcgagaatgcggcgctggaggatgagcgtggcggaggtgcggcgttatggcaacggtcctctaaatatgacgtcacggataggatgggcgtggcacgatggagtttgcatgac

SEQ ID NO: 77034 - DNA, 426 bp, Oryza sativa
  unsure (1)..(426): unsure at all n locations
ntgtccatcactcaccgaagattcttctcgatcgtcttgtttatatgtgttaatgcgaaaaacaaattaagggttggctagtgatatcaaagtgccaaccaccttttcgttaccctgctagctagctagcgctttatatatatccatgttaatcagtgctgcatgacacggacgtcaatcccctgtaattcgcctggagcaaaaaattagatgggggaatataatatcacattgagcgacaattcggctcatatatatatataaaaaaaaaagggtgtttgagggcagtctcgtttttctcttatcgttggaaaaatcataataaaatataacaagatagattaatataagacaaaatacattaatacgtggtgatatataactctataaatgtacatgtctaaattcgagttacaaatttactaa

SEQ ID NO: 77035 - DNA, 412 bp, Oryza sativa
  unsure (1)..(412): unsure at all n locations
agctngccaaagagacgacacaacaacattttcatattatcattgccgagcttgccacccaagcgccacagcagcttcgacttcattgcgatgctactccaacgccaaaatgaacaaataaaaatgatacccacgaaggacatcagcctaaactactaaagaaccaatcctactcacaactagcatcaataatccaataaagagattgcattgtgtcatcattgccaagcttcgtcgcacccctacagcgaagcagctccgactctactcaacaataaccagataagagtgatgaacacccatcgtagagcaaggaacgaaaccaaggcagtgaaggcctcgtcaaaacaccctaggcttgtagagcttcggagacattgcaggaatccaccaatgacccattgcaagcaaa

SEQ ID NO: 77036 - DNA, 467 bp, Oryza sativa
  unsure (1)..(467): unsure at all n locations
ccttaaaactcagcttgatgcataaatgttgtttcgacaatgacaaatgatactatagtgtatgtatacatataaaagtggccttttattctgcacagattcagaattggggggccncctactcctatatattcactcacagttctcatgctaatctactcctattcttttgaacggcttgaaattcgaatttctgcctttaccttaccatatataaccgatccttttataaaccatcttaattataaatcttatctcactcactcttctcttctctttctctcctaaccacacaagtctcccccatcactcaactcaatttactaaactcccacctcatcttttatatcattcctaccttcactaccactctttatattctaccttttaatatctataacccctcatcctacttttatcgtcaatttttatactcttcaatttcttctattaccactaatcttact

SEQ ID NO: 77037 - DNA, 444 bp, Oryza sativa
  unsure (1)..(444): unsure at all n locations
catgcaagctntaaacttgggtttttatgtttactattgatttaatttcaatttcaacaaagagcagtacttgtgattggattgtacggatctgatgcaaattaaactttttttctcctaatattcggcatgatttattgatttgcacataagtcattcatgaattttttttttgcagataataccagtggcggaggggccaatcccaagaggagtttgggccaatcgctggcccgtctctctccatcaatcctaagaaaagttgccgccggcgatggcgacgacgagcgacggattatggagcgcggggagtcgccggtagctgcgacgaggcagcgccgatttcgcgcaaaggttgttcagatattatcagaatcagcagcttccctgttcagtaagactgattatctgtcaggttttccacttctcctagctgaatgttca

SEQ ID NO: 77038 - DNA, 176 bp, Oryza sativa
  unsure (1)..(176): unsure at all n locations
taatcgccgcgatatttattaacttatatntattattttattctaatttatggagtccaatggcgtccgcggctgtgcggtgcagccgctcacagcgtcgaggcggctgctggcgcggagcgcgagcaccacagtgtctcgcgccggcggtatttaattttttttatatatatgtt

SEQ ID NO: 77039 - DNA, 470 bp, Oryza sativa
  unsure (1)..(470): unsure at all n locations
ntaacaatntatggactagttgtggcactggcgctcttatttgcgaacccttttgtttaatcctaaagaagaaaacgagtcctttagattagatactttcttctttttttagtaaattggtatttgcttctgcaattccaattatatcaatactttactcctaatttattactcctagagttttctatttatggggacagacaataccccaccccaggaatagctgatttgaggatgatcaatttagaggatatgttcgccgtcttgcttcccgccctttgtttagggcagtggaaagtatttttccttttaatttaggaattttgggaacatttcaacaaaggaggtctttcacaggtcanacgagatctaagacttaatctaanagaaattactaaattgaatctatntctattannaaaaaatgcattaaaaaaaccgatcaaaagggcgagcgaagtaagtgatcg

SEQ ID NO: 77040 - DNA, 394 bp, Oryza sativa
agcttactatttaaatttatgatctcataatgggcagccacacgctttcagaatagaggtcggattgtctcgcgcactcgtgctatatacccttttggtgccccccggccgctgcccgccggagcgcgcggcgtgtttcgtcttcgcgcggcgaggcaatagtgtacgctaacgctagtgccgtttccgcccactaactcttgcctgcctgcccgtcccaacgcgcgcgcgcgcttgcttgcgcgtcacatggcttgcgcctgcgcgcgcgcgaccgcgagttggcgatggcggggcggcaaaaacgggggaaatcgtatcgtgggtgggttggttttgctcgctggttggctcccgtggggggttgggggcggtgggaaccggacgccatggg

SEQ ID NO: 77041 - DNA, 385 bp, Oryza sativa
  unsure (1)..(385): unsure at all n locations
ntngcctttntccaaaaagcagtaagaacaacaatggtttataatctttgcatttacgcctgagtatattgggctattatcattattcggaaacaaaattgaatcactttaaaacgtcatctttaacgtaatcggctactcctatccttggaagggcttgaaatacgaattactgccgttaccttaccagatttaatgtttcctttaaaaaagcgttggtaagttagaacctaattggcacaactttgtcacttcaattatgcatgttcattcaaatgatgaaatggcatatttagatagaatctttatntaaagtggtcaatttcgggtcatcctatgtacttagctctaatcacntaatggcatgtngagagtaacaagatta

SEQ ID NO: 77042 - DNA, 400 bp, Oryza sativa
  unsure (1)..(400): unsure at all n locations
agcttngcccatcattttgtatgcctttctcttgagcctatcctctgcgtaggctggaagagtgaaccatttctccattgccatccaagctcgctctttctcggcttctgtgaccttcccgatatttttatggatgatcccgaagttctcacgtgccgctagcccgcagcaggtataccatcttccaatgacagtcctgggcgccgngggcccaccactancgtcaacctctcttataactagcactgtggtcggccattgtcgcgtcccaaaacgactctaatatacatcctcaaaattatgccgagaataattaacattcatgtgaaagcctccaacaatttaaatgtgctaattttaaactcaataacggcttggagaattttgtatatttcctaca

SEQ ID NO: 77043 - DNA, 489 bp, Oryza sativa
  unsure (1)..(489): unsure at all n locations
tgtgaggatcgctgagttgcaggatgagaacggtcgcctcaagaaagatgtagccaggctgcacggatgctcaccgccaggaggagcccgcatccgcaccatgccaaggaagtcgaccatagctccagtgcgcattcagcttgcgcccaggaacccgccaccacctccaccttcagcacctcccgcagctccggcgccagctccagctcctgctcccgtgccagctccagcatccgccctctccttcgtgccagcttcagcctacaggggtccagcaggtggcagtggaggatggctgccagcttctcccagtggtggtcgtgtgatcatcagcagttccagctctgaggcaggcagcggcgacacctaccagctatatatgctgattntctttctacagaagtatatactggactctgtatgtactgctttttctatggagtgtaatatgctgaattntctatggtcgggatatactgaaacttgtac

SEQ ID NO: 77044 - DNA, 318 bp, Oryza sativa
  unsure (1)..(318): unsure at all n locations
ccttgggcgatcacaacataaataggcccccctacacgaagctaagggtcttaccaacggatggagatagcgaatcttaggaacgcttttctaccagtttgcgccgacttccagccactaagtgatgtacatggtgaaagtggagatgatgataagggatacaangtttccgttgtttgcttcatggcgcgcggtgaatctgacacacagtatgaagataatgaggtgagtgctttcgatcgagcctttccatatttatgtgctaagaatcaacagcgtgacaagacgattaaaaacacgaatttatcattgaatctc

SEQ ID NO: 77045 - DNA, 417 bp, Oryza sativa
agcttcttgtttcctcatccacttgtagaacacataaacaaaaaatgcattgacaaatgttgcaaaaacatgaagcaacgagtcaatgctctcacaaatcacagctgtaaccaatgcctgtataccctatatttatgcatgatgattcatctaacagaccttgcctcctttttctttttggcaccagggaaattaataattgcattaggactgggatgcaatgggaaagacaggctatgtgacagtctatgcgactgtgaggacgcttggagaagcgactcttccatgcgtggtgcaggattcgcaacagcagcaagggagatggactgtcggctatgttgtactcaagggatgaaatgtactgtaacaagtatgaactagcaacttgacggtggctcaatccttgttgggtggagc

SEQ ID NO: 77046 - DNA, 483 bp, Oryza sativa
  unsure (1)..(483): unsure at all n locations
ntagcaatgcccatatggccatatctcttgtgatatatgtggatagtcctggaatttagttgaatttcttggcccattattttgtccttgctaaattaatgtctcgatccacattgagacccacttacagaaaattgatccatcaacaacatttttttctatagtggcaggaaatctccaactcttcgatatgcgctaactagttaatctatttacttaatttgatatgggttctcttgctacccaaaaaaaagtattgatctagcttacctggaaagaatggatcgctacccttggagagctaatgataatggactaatagcgcattgattgaaccgaccctgacgtaccactagggaacttataatctgacccaatatgatgtataaaaaatggcttanatgggcttatctcagctaccaaactaacagatcagcccaacaatcaccctaggcctgaacctgacctaagctagcaattttc

SEQ ID NO: 77047 - DNA, 432 bp, Oryza sativa
agcttgtgccgtgccgccgcctctggcccttacgaggagagatggaggcgtggagttcggtgccgctggcgctcggacgatgacgtcgctgccttcggccccgatgaggagagatggaggcatggagctcggcgtcgctgccgctttgcttcgtctgcccgagagagtgagtggtggggaaagtgtgagaggagagagagggagagataaaagtgagtggagagagataggtgggatccactccaagcaacatgcattgtgaagtatgtagctaatatggttctttagcccagttagaagcccaagcgcggcattttccaggacacactgtgagtagtttgcaagatatgaacatgacaaaggtaattggtaggaaccttttcatgtcagcacgtaaaacaaaacgaattattagctcatatttaattaaat

SEQ ID NO: 77048 - DNA, 434 bp, Oryza sativa
  unsure (1)..(434): unsure at all n locations
tncggccacttggtgaacttgtcgatggcgacgtacattttctgatacccgcctcgagccgccttgaatgatccaaggatgtctagcccccagaccgcaaaaggccaagagagtgggatgacctgcaaggcttgggtcggctggtgggtctgtttggcatggaactggcatgtcttgcaccgccggacccattcctgggcatcttgtaatgcagttggccaataaaagccttgctggaaggcttttccgaccaaagatcgtgaggccgaatgggccccgcactcaccctaatgggtgtcggctatgagctcgatgcctgctcccgagaaatacacttcaagagtatcccgttggcggcacgccggtagagggtcccttctacgaggacgtaccacttagagatgcgcgcgaacttctcaacttctgcgcgatgc

SEQ ID NO: 77049 - DNA, 457 bp, Oryza sativa
  unsure (1)..(457): unsure at all n locations
atgaagcagtagaaggagaagattataccccgattttggccctcctttggatggggaggcagaattgcctccgttgttgtagtcgttcacggcacctcctcctggcgcaccagctccggatccagctcctgtcggcgtcggcggcggcgcagctcctgtcggcggcggcgcaccacctccgccaatagcggcggcagcaactccagacatggcgatgagcagtcgtgcaggaggcactccccaaaaacctgatcacccgcctacccggtgcagatatcaggcgaaggtgtggtttcggaggcactgcttcttccaatctctcgtgcgcgcaagagatcagaagcggngaagcgagagcaactcangcgcggagaaggagaaactaacaccgggaaagaagcgaggaactcggatcggactcgcggcctccttatctatcangagagagaacgtggac

SEQ ID NO: 77050 - DNA, 466 bp, Oryza sativa
cttaatgtgttcaatctgttcactatagtcaccttactctttattgacagctatgtgaccatcgattggagctccgttaagatgctgaagccgttggctgccctgttaattgcatccataagaggaggcaaatcttcagcatccattaatgttcgtgtcatcgccacaatcagagataaaactgccgccagcatttgtctgtccacagattctgcacgaagtgttctcacaagcacctgcaacattatgtttatcttcagtatgacaagcgtaacgatccaacacaaagactatatatcaccctatatatgatgctgataaaaataaagcaagtgtgtcttttcttgcctcaacagactatcctctggactcttacctttaggcttcctgagctctgatatttcatcatctcatggataaccacgctgtcgtgattgccgggctatctgattcttggatatctgct

SEQ ID NO: 77051 - DNA, 446 bp, Oryza sativa
  unsure (1)..(446): unsure at all n locations
atgaagcttgnaaatnttgcatgtgctanactttcttatttcttgtttattcttgacatcctgcagaaggaggtagtttgatcacaaaacgtgccgtgccatcctggcaaaaataaaaagactcgaatattagaaaaggaactaatatcaaataattaaaagaggtaaggctttgaacccagatcatctaacccatcatcctgtggagttagctggaagactcctagacatttctcaccatcctcacaaaaataaatcatgcagtactaataattaatcaatctgccagttgtcctcgaaaaagaaatcaatctggcagctgttcatattttctctatgccttctataagaaaattaataaaaagtggttattttctcaaagataaacttttgcctgacaaacaaagtgctgtcatgtaacaccctgaaaattcgaccgacaaaat

SEQ ID NO: 77052 - DNA, 439 bp, Oryza sativa
  unsure (1)..(439): unsure at all n locations
tcactgagaaatacattaaagtgagagcagttagcagtttttattcttatcttccattgctctaagatcattgtgccattttaaagcttcagtctttcccgaaagcaattgcaatgtgaaaaaaggtggcctaacaagatattccatgctgatcgcaatctgcaatgaaaaatccacagtgagaaagtattgtgcatggacatactttaaggaaggctcacaccanaagagtaactgaagaaattaccttggcttccagcattacttttggaccattcttcagagttttactcaagaccagggtaaactccctggaagcatagtcctnccaggaattgtctgtagcaaggttgaactttttcacttcttggcaacaaatgtctgtcctctaactactgcactatcatcaaagatcagatcgtctcattctaccaaactg

SEQ ID NO: 77053 - DNA, 422 bp, Oryza sativa
  unsure (1)..(422): unsure at all n locations
catgcaagctngcaaactttagnttccgcggcgcattgtttatacgatattatattatcaaactgagtaactaattaactatctccggttcacaatgtaacactttctagcattatccacatttatatatatgctaatgaatctagaaagtcttacattgtgaaacggagggagtaattaaataattaatagtactctcctccatcccacgaaatagcaatttagtacccgatgttaacccatcataatactacaatattagacatagattattctgtccagattcatatactccatccggccgtctaaaaaaacctagcatgtctagaattatttattgcattagattatatcccatccaagtttcagttgtggtttttttctttttgaacgatatatgatcccattggtgattntttttt

SEQ ID NO: 77054 - DNA, 452 bp, Oryza sativa
gctatacctacttatgctgtcccttgccctttgtttattctactcttggtacatactattgaaggatgatgtttattaagggtagtaagaaagctcaaagtcagtggaacgagcatagttccgatcggcttgaactcaaactctaatgatttatgattcaaaccatgctatattattatgctcatgagttaatcagtcagttcacgatcgacttgtttaactcgttagtagaagagatcgtcatattgttatatacttagtgcatcattacgagtgggtaaacttctagtatattcaaactatatgacatttgtatgatagtagttattcataagtagtttaatattatgtaacatataatatataaatagtaatttaaagtacaatctagcagactaacaagttacgatcactacagcaagctatctctattcactatatgtaatgaccat

SEQ ID NO: 77055 - DNA, 351 bp, Oryza sativa
  unsure (1)..(351): unsure at all n locations
catgcaagctnggtcgtgttccaaataagtagccttgtttatatgtgtattgtggtgagctgccgttggacgactaagtttttggttcgctagcttatgcttatgtttatccatacggagtaattattagtaacaaaaaaataatttatgagtaatttttttatatacgtgcccttagtgattaaaaacaaatactggtaaataaagatggattaaaccccagaaaattaactttaaaattaagttttaaaattaaaattctagcttatgagcatantaggataagaaaaacatgatcgaagaaatttcactctgcattggtgggcataagtatcctattaacatttataa

SEQ ID NO: 77056 - DNA, 405 bp, Oryza sativa
  unsure (1)..(405): unsure at all n locations
ttgcgactntctgagcaaactcataactgaatgttggatattatagaatcacttttagtatagtgattgagtcgttgtggatactgactagttttaaatcctaatgcccataattatacgcatatattgatacggttctaataatactttgatgagttcacatattaattggcttattgttactgccactttggcttgagctagcagtgattctccatccctatccgtccataggggttgaatgaattttcctgtccaaactgccatgaaccagtagagatgcttagcatcactgctgacccatggcatgaattggctgtgatgtttcactgctggttcatggcatggaccaccgtgaggattgaacccaataaaattgatctatttatgcatcttgtatcacta

SEQ ID NO: 77057 - DNA, 408 bp, Oryza sativa
  unsure (1)..(408): unsure at all n locations
agctngcattanacacctaagttcccgtgtcttgctgagtacgaaagtactcacccttgctctatataaatatatatagttcctccatcctgaagctgaagatgaagtgaattgaagaatagggtttcgtcctggttcccagtcgtcgcctgtggtgttgggtgttagaccgttggttccgctgctgctgctgttgctggtgtttcctcgtctgtgtcttcggttgtattctcaggctgtcctgagctgtaacctaagttaaggtaaataagtcctctatttattttaaggatttgcaatgattcatatttgtcaccgtggataccagcactatatcctgngactggtaccgagatcgcggttttgtaggaagcggttcgcgccgtttttcctacgacacgctcctat

SEQ ID NO: 77058 - DNA, 508 bp, Oryza sativa
  unsure (1)..(508): unsure at all n locations
taagcttgcgccaactctgtcaaacatttcgtctgaatgtgtattgatatatgatggacaaacaagaataaaaacgccattattttcaatttgcgttagtcaatttgcgtcagtcaattttccatgtgtatagtaagcaaattgactgacgcacacatcgcgtccttgtaacgcagcatctcatattctagatgaacgaaagtacataccactgtacgaggtgatcgaaacaaatcgatcgagaatatcagacccgctggcaaatacgtacacacattgcattcacaggcaatatatgcagcttacagaccactccacgctacagcacccaaccaattaaacaagaaagatgataataacaaaacanaacagaaaatctagacacgatcgatcgatcgattccttgatcgcgacaaagctacgggcgcgatcaattngagatatcgccctagcannaataaagctagcctctactataccagatcacgggagtgcactaataatcaac

SEQ ID NO: 77059 - DNA, 400 bp, Oryza sativa
agcttgcctttagcgtgtatttctttactctgtgctgaataaggcctggagcaggggatgccctgattctgcaattgaggtgcccgcaccattagatcctggatgccctgatctacaacagcaatgcctgcagctgcaagaccaaccaactgttagcagccaattacacatggaaaatatgacgggatggatgatgtcaatgaccaaccaactgtcaatgatttctaaggcaattctgaaaatattataactagtttggtgtgtttacagtcctgggagccaatactggagctgctactagcatgagttcaggaacaaggtaacttgtgcaggctagaactatagtaattgacatcagcagcatggctccaatgtgcaccaattcggcgtcacattggtc

SEQ ID NO: 77060 - DNA, 484 bp, Oryza sativa
  unsure (1)..(484): unsure at all n locations
nttatggaattcaatgtgataagctatgggttgagatctatctaaatttcaganaattttattgataagtcaggccacatcttgatagccactagtgatggtacgtagtagagagactacggacatgaaatggagcacatacaaaaaggtcatcgatccccctttttttttctgttttcaaatgatgcataagagttgctttacttatcacaaatgccaaaaaaagtgcttctttttgtgaaaaatgcttcagtacggctcgacttggtcggttcattaaaaaaaagtcagagagtggaaagatgtagcttgcttaatttatttacaggccatgagtcagctaagtataaagccgcacccatatatttgtaaggcaaaggacaagttgcattctacctcaaccaacaacaatgtttccaagtgaatgtacaagtcatataggtgcacaattacaactgatgtgttgagagctactgtactatag

SEQ ID NO: 77061 - DNA, 404 bp, Oryza sativa
  unsure (1)..(404): unsure at all n locations
agcttcgccggagatcattacatggcgactgttcggccttcacagtgatgacgacttccggcggngttcagggcaaaagaacgggtggccgggatagagctcttcactacaaagccgagggaggcgacggcgcaaatcggggacgaccggagaggcggcgcgactcggctggagttggcggccggcggtggagagagtggctagcgtggggagaggcggctggggcacggcggctcangaaaaagaggggaaacggaagaggaggcagagcatctgctatttatagccaaaggaggagatcggcttggatacgggagggataggcggcggattagctagggttcgccagaaaaacggagctcgaaaccgtgtcgaattcacgcaatatacaacggtattcaaag

SEQ ID NO: 77062 - DNA, 237 bp, Oryza sativa
  unsure (1)..(237): unsure at all n locations
cacatcaaactcagcttaaggaacannaaacactctaatttctgctctcatcttacttcgatattgcagttttttccttaaataaacaccgcacacaagcaattgcactaaaaatggctctgtcagaccaaatggccgccacatatatattccatccgattatacagaacacaataagtgctacttcctccgtttcacaatgtaagtcattctagtatttcccacattcatattgat

SEQ ID NO: 77063 - DNA, 461 bp, Oryza sativa
  unsure (1)..(461): unsure at all n locations
ngcacaactgtaaggtacactaacattcgtcccactgcttctaattccttcaattctaagccctcaatccccatcgatgacattgcttcaacattaaatgtccatgtcctgtctgatgttccagacctacacggccattggccaaaaattgcgcatactgatcttcccacaaaaaatctgtaagcatatggtgtctgcaaaataaattntgattgaatcaacagaccgaacaacaaaaaatcgaattcaactgattctaaagcatatactcacatgctcaagattagggcactttacaaacttattgtttggattcatcggggtcctcgacgttcgcgcctccaactgggtcccgcacaatggacatttgcccaagagcaactcagtggtgcagcgaggaacgatcgaagaagaaatagagccatccatcttcgccgcttttagcgctgcttgcccgtcgc

SEQ ID NO: 77064 - DNA, 405 bp, Oryza sativa
taagcttcgaaaaccaagttatacatgctgtggagaagaaattatgcagcctgacagttcatgaactctttttttgttgacaccaagtggtgtaatttcactctgcaaagtccttatagcacccatgacattgtcatttctcaaaagttcaagaaatttttgttccagtatcagaaatatagcagactttacaatgttttcgtccaaaaggccaaccttcttcaaggtaaccactgcactatcccaattcccatcaagtacctgccttctgaaaagattcactgttggggaatgcagagttattcctgattcttcctcaagaactggctccgctttttcataaccaaggctatacagagcctttgtgattatcctcacaaaatcatccctcttaataacaccttt

SEQ ID NO: 77065 - DNA, 445 bp, Oryza sativa
  unsure (1)..(445): unsure at all n locations
tgtgctatgatatatcccaattaaactagcttgtgggttaccaaaaaacataaatctgctaatggtgcattntattagagcgcgcacgataggtgatgtgctgtgttgacttgataattaatcaagctgctggaattctcgcttgctggcttgcactggtagttgggaaaataggtccctagaatccgttgtaattgtgatcctacaacctagagaatgtgaataaggtttntgaaaaagcacggtgcgacattcgtccatcacggctcatcttcctctatgttgaatagctaaatgggtgaatatgttaaacatgcaatattaattattaaatatattagaatttggagggatgcaacactttccagtactatgattctggataggcttatctctatattcatagattangaaatatgacatccctctacnaatccttaatatg

SEQ ID NO: 77066 - DNA, 427 bp, Oryza sativa
  unsure (1)..(427): unsure at all n locations
agctntntgacagctcatacttctttcaataatagaaaataatgagatgctggaaactatagaaaacttaactaaaataaagagggagtatacattacgtattactctctccgtattttaatatatgacgccgttgattttttgacaagcgtttgacattttgtcttattcaaaaaatttataattataatttattttattggaacttgatttattatcaaatattctttaagtatgatataagtacttttatatttacataaaaaaattgaataagacgagtgatcaaacgtggattaaaaagtcaacggcgtcatatattaaaatacggaggaactacttcacattgcaacgtgtaggtgtggtctcgtggaggaggcctgcactcacttgttcagcacatgcatcgtcttcatcattcacgtct

SEQ ID NO: 77067 - DNA, 492 bp, Oryza sativa
  unsure (1)..(492): unsure at all n locations
tgtccatcctcttcttaggtggtggcttagccgctgacttcctctntcccatggctcaagttactttcttccttcaaagtaaaacaaggaacattaactataatgttctgaatgaccataagttctacaagtttctagttgtaaacatgacacaaaacatccataggtaaattcatatcgaacaggcaatttacgtgagaaacttcagtgtgttttgaagaatatgtattaacacacacaacataagaaagttcatctatgctaccaaattctattatcacaaaaggaagtggccagtgaactaatcacaatggtgttcaggagcacaagatcctatntgttcctgcgatggatactacatcaagtgttcatcaatcagtaaaaatttaataaagatatacttcatagagagggagattgcataaccctcccaatcaatcaaccagaaaataaccacgacatgctggagatcatttgagaatcacagcggag

SEQ ID NO: 77068 - DNA, 433 bp, Oryza sativa
agcttgtcggttggatgatacaaaatgcatcaaaccatgcatccaaaaaatgttgtcggtcaagcactgaagaagcatatgcccaaacattttgcaaaggacagttgactgttgagctcatgatagaattatcccactatttcactgacacccaaaataatctcaagatgattagttatagaggttactggtaggccatggcgagtattcagacattcaggcattgcttcagatagattttacagggcaaagtgaagaaccattgctttaaaacaaaaactgaaagcatactatatctagtttttgtcggcatcttgcacacaggtggccagttggtgagcaacactgttaattaatctacctctcttggttaatcaaggaagtaatggagtgattagagttgagaaatgcttatagctagcatgcgtgtgtg

SEQ ID NO: 77069 - DNA, 463 bp, Oryza sativa
  unsure (1)..(463): unsure at all n locations
tcggattacctnctttgtgattgactcaatgggcttcatctctattgtccctgcaggacgggtcacacttgacctctttgcagctgtgtatgtcacaaaaggaaaacatccaatttttccatcaaagatgcagtttccatttgagtcaaaccttggtctggcgagagctgttaagatcattatttttgggatgaagtttttgttttgaattgtcctgatgcgacgcgaggcagttggagctgcgtaatatcgcacagtcttcctcgtaatgttgaaccacttctcatctatgaaaatgaaatcaaacagtggtttgaagacaagattgtgaggcacactccttgggtcaagcatttcaatacaccacttcagccgatcaattntgttttggtctgtcaagtggggatccaatgagctagatacacgctttatagcaccctctttttcattctgtagacctact

SEQ ID NO: 77070 - DNA, 322 bp, Oryza sativa
taagctgtttctaagacaagtcatgtgagaacaataaggctctgtttagatataggggtgtaaagttttgacgtgtcacatcggatatacggatacatatttgaagtattaaacatagactaataacaaaacaaattacagaatccgtctgtaaactgtgagacgaatttattaagcctaattaatccgtcattagcaaatatttactgtagcaccacattgtcatatcatggagcaattaggcttaaaagattcgtctcgcaatttacacgcaatctggataattagttattttttcatttatatttaatactctatatat

SEQ ID NO: 77071 - DNA, 475 bp, Oryza sativa
  unsure (1)..(475): unsure at all n locations
gctanggatgagggcgcctacatcgctacactatttatccaagccatgtgttttaataaaaatggtccgagttcatttgatgttgttgaaatcttcgacaagctgagagctgctccggatacatattttaagaacatcaaagaagctggatgcatgggggcgagcatggcattggcaatgaccaagtccttgtacccgaagatcgacattgatgccgtcgacagctttgcagacgggacaagtgaagaacacgcccttgacctcatcgatgatgcacacaagattgccgacaagatcgctgcggatgtagctgaggggtttcatgacaacaacctcaggccgactgggtctgatgattttgatgatgaaaaaactgagtcttattgacantgnataggataacttatgatgatggaggcacaatntgtacaatactgatgaattatgctgtgctgataattaaacttacctctga

SEQ ID NO: 77072 - DNA, 452 bp, Oryza sativa
catgcaagcttgcccatgatcggtaagtaaaatttttctattcttattaaagtcatctacattcagattcagaattattcttattcaccagtctaaaagcaattattcttattcagctttctttctttcttactttcgatcttcccatttcagaaaatccacagagctgctccggaaacaagtgttcgttttgccctgaacaatatcaaattgcgcacccgagcgagcaggagcttttatgtggaaaagaagaacatgccaaggactttatcagactgatgaatatgtccccgatgcccttcacatgctccaccgaaacgcctgagattggaattgtgattgaacaatagcaatatgcatgaaggcattattatggagcatgccttcatattaggggccataatataataaaagccttcatgcatcatcaagtgtacatattatggtcatga

SEQ ID NO: 77073 - DNA, 454 bp, Oryza sativa
  unsure (1)..(454): unsure at all n locations
tattatagttagttgcataaagggccttatgatgtcacttatgtgctattgtgaccataattacattcataaatgctgtagttntctttagcagcttactgacggataacaactttgagtttgatatagtataagcatgtaacaatctgcaggactccagaccatctaagtagtaatctttaggcaaacccaagtatcataatggatatgataggattactttcgcttgccgtattctcctttctggtcactagttatattttccattaattccgaagatgccaaagttgcttagtcaatttcgacttatcntcttttgcgtcaaaaaaaaattcgacttatcttctatttattgataggaagatttgcacgataccaaccctcatacatagtatcagtgtcactggtctatgagattctctacagggtagntcttttattacaatgctgaact

SEQ ID NO: 77074 - DNA, 388 bp, Oryza sativa
  unsure (1)..(388): unsure at all n locations
catgcaagcttctaacttgtggttcgatctccttgttataagattcagangttgtttcgagcttctcaacttggtgtttcgaccttccttctcaaggtgaatccatgacaataagtgtagcactagagaaaaagagtacggcgatatcagcttgctggtcttctgtgctgaaatcaccctggcatttaacaatgtcagtagtaggcaaacagcctaacactgtcaatgaccgcataattccaactcgagtgaaaacattgcagtatggccgtacagtggagatctggttaaaaaaacaagaaactagtgaggagacttcaaccctcaaaagtattactattaatcagtaacttctcaacaattctgcaaaacactgtcctattgacaa

SEQ ID NO: 77075 - DNA, 125 bp, Oryza sativa
  unsure (1)..(125): unsure at all n locations
cccccagaagggnttgatctcatgcaacccaaaaccaacaaaaagaaacgacgcgccgaggngtaacatggagcttcaggccacggaaaaagtaaggcggcaacagcataaagacacccggcaca

SEQ ID NO: 77076 - DNA, 409 bp, Oryza sativa
  unsure (1)..(409): unsure at all n locations
agctnggtgggtgttacagtatagtcctattatactattggcgcgcggtgattntacctacatgaggtattctttggtgattgatgtttttcatgctacaagaggaaatttgttttaaggtggagattgttaaatatgtgatccgaattttgggcccacaatatattcggaatagtttcctagtaggagttcctattaggtgtctttcttttatcctctatatatactcttgtaagccgtacgggaagggtgacgttctcattgtgattcccctgcgtttgtaatcaactactctatagtgatcattgccggtcggctcccgtggttttttccgcaagggttttctacantaaaatcgtgtcttcattgtgcatctattttcataacaacatggngcaaaatagcatgc

SEQ ID NO: 77077 - DNA, 477 bp, Oryza sativa
  unsure (1)..(477): unsure at all n locations
tggcaccgcactntgattcgaagaaacagttaattaagtagtctgtttctaaaaatctacataaattaggtttttcagtttctaacttttaatttatttactagattctacaacttcttaaaatctgaactgtttgagaaagcttctgattcttaaaaaaaactgtaattgtcaaaagctcccaaacaaaccctaagttcgttcgtagtggatgtttcaaacttctccaaccatgtttcccacacacacgtttctctgatgcgtgtttttaaaaaactntctataacaaagtagttntagaaaatcattataatacattttttaattcgtgtagctaatacataattaattaatcaccatgtcccatntataattctaggaaatgtctcatccatccaaaatcctttatattttttcagtanaaaaatcttttattatttgggacagaanggagtatgtgtacttactccatctcat

SEQ ID NO: 77078 - DNA, 394 bp, Oryza sativa
  unsure (1)..(394): unsure at all n locations
agctngacgagnnggtgtttgcggtccggttgtagacgcaaatcagaagaaggaaagatggcagcggccagcggggagagccctaggccagatttggtgagctcggcgacaccgtcatctagctttctccccctccaccataactttggcaagcgaccaaaccttttttgccatagcttttcatttttttatttggaatatcaactagaacaaccgaatatacagttccttaacatgtactacatggcctgcgttgccaaattctacaaatgtgttgtgctcgtaattaattcccaacaaattatatgtgacttttcacatatttttatactaataatattgtatattaagaagaattaatagaacctgactgaagtatgcagtgataaaacac

SEQ ID NO: 77079 - DNA, 465 bp, Oryza sativa
  unsure (1)..(465): unsure at all n locations
tctccanattgacccatagtgatctacaaatgcctatgggatgacaccatatatatgttgcaggcgtgatggtccaacgatgggacgtttcaccattagcataaatattgtttcttataggagtacagtatccattcctcttatagtcacaaaataatgttgttctagacttttgaaagttttttttttgccgggttgacaaaggattagccggccaaatttcatcgatattttgaggagaaactgttaaaaatttaaccacgacagtatacccaaaactacctgagacaagcaagaaagaaagaactaaagtgttggttgtcggtccaaagggaaatctcctccattttctgttaatctgaaccatccatcttccatcagagggactaaagtanaaccgcatatacacccagcgtcccaacaaatacaagcagtcaatcgagcgcttgagacgccaacaccatt

SEQ ID NO: 77080 - DNA, 380 bp, Oryza sativa
agcttcactccctctatatcatttgaaacaatcatcaattattttcggtcaatgaaaccccactctcctaagcaactaatttatcttacgggccgattgatgaatctcacaaatcccttcatgcactactctcctagcaactttagatatctaagtaatactccatctatttttcggcgatataatatttgagcgcttgccgccgaatcttccgatcaatcttaagtgtagtatctttcaaatatctaatcaaaggaattctccaagctatttctaactcatgggcacaaatatccgaattcacaattaattcggcattttaatcaattgtaacgtgcacccaactctctgcccgggatcggtcagaccggccatgcaat

SEQ ID NO: 77081 - DNA, 450 bp, Oryza sativa
  unsure (1)..(450): unsure at all n locations
ctaggtggatccgcttcgtgttggtggcgtgtcaaaaaataaacaatagtttcatcttctaattttgtgattacgtaccccttcatgtcgagcctccaactgttcgtctttcacttgataccgggcccctttgctgctttaatgactatgttaattgtcaacgtcaatctgcacgggccaactccatgccatgcacggcccaagggcatgcggccgtgccatgtatcagcatgcgttgtgttcggttatctttgttgagcatctccgttctatatttatcatagagctgcttgtggcacaaaatactactccctccatttctaaatatttgatgccattaacttntttaaaatatattaaccgttcgtcttattcaaaatnttgtgatatttaagtagtagtagtatatttaacaatgaatcanatgataggaaaaatattaataattac

SEQ ID NO: 77082 - DNA, 345 bp, Oryza sativa
  unsure (1)..(345): unsure at all n locations
agcttgtcaccgattggtcttaaccacggtgttcgggttacccgtgtgctngggccaccaccgcacactcgagtgcactcccattgccgaaagtatatttcattgttgtattgggtgagctttttgaagacaccgatgaangagaagttcatgatgggtatgactttaaataagacactggtaccagccagtgcccgcttctgcacctataaaatgtagatcttgtaggtctcaatacttttcctgacaccttgaagatgtagatctcgtaggtttcgatagtcttcttgacaccttanatatgtagatctagtatatttaggactatgttgtagataaactact

SEQ ID NO: 77083 - DNA, 441 bp, Oryza sativa
  unsure (1)..(441): unsure at all n locations
ngaattcagaggagaaaggtgacctgatgttgatatctctgtttggcaccagattgaggttatcagaaatttctgaagatataacaagtgccgtggttatccgatttagttcaagtttctgtaagaaagatagctgattcatgatttctcctattcgtacacagcggcacaactaggcaagtgatctttttctatttttttgagatggagtgatcgtttgttgtacaggtaacaggtcagcttcgctgtaatgtgatcaagtttttatatttgaatataggtaccaggttccttaagtgtacagcatcattgttgcgtagacttaatccacgattgtggtttgtacacaacattaatgtgaagacaatgatagaaaanaaatattttaagtcgggttatttgaccttgcatgaatgcatgagatatctcgtgacangtact

SEQ ID NO: 77084 - DNA, 408 bp, Oryza sativa
  unsure (1)..(408): unsure at all n locations
agcttgtgcactctcatttgctggttagttgatgtcggattganntgatccttgccaatgctttggtggacatgtatggtaagtgtggggatttgttgatggctcatacatgctttgacatgatgcccttcaagaatgctgtttcatggacatctatgctttgtgctctggccaaacgtgcgtctattgatgccgcaagagattggtttgaacagataccagagaagagcataatatcttggaatgccatgatctcttgctatgttcaaggtggccgattccatgaagcgctggatctttataaccgtatgaaattgctaggcctcgctccagacgagtttaccttggctgctgtcctctctgcctgtgggcaacttggcgatttggcttctggaaagatgatacatg

SEQ ID NO: 77085 - DNA, 411 bp, Oryza sativa
  unsure (1)..(411): unsure at all n locations
ntagaaaaagacccacatctagcgtgagaaagcacatttctttgcaagtatatcaataccggagggaccagccgcacgaattccggcccaagggtgaggactcggactcgagcagcccaaggattgcagctcgtcgcggccacgcccaatgcctcctcctcctccaggcgccgcagcacgatcacacgcttctctcccgtagtctcatcccagaggcgaatacctgaggcaaccacgaatgttcatcagaagcggtgcatttggtggatgcgcagcggcggcggcaatgggggaagaagcccatgcctcccaggtgctcgacgaaatggcgaggtggngataggtttcgggcgcgtacctgtgcgagcgggctgcgccaccggcgccggccggacgatgagcgggatcgtc

SEQ ID NO: 77086 - DNA, 387 bp, Oryza sativa
agcttatccctaagggatcgagtttaaagaggatgcggtatggcagtttatctattaattaggaatagtttgttagtttccttttatctttaggaaggtgtgtttagtgtccgataaggaatttatgttttccttttatctttaagttagtttctttcttgtccgacaaggacttgtatcaacccatgggtataaatatgtacacccggggtctatgtaatctatctccacgatcaatacaattcggcgcatcgccaccttttaccttttctactttattttatcgtccggcgggacttggcacttgacgtggggctgcatcggtgttcgatctccggcgaagggataagtcccatgttccgtcggtccaggcaattgtatcgtcta

SEQ ID NO: 77087 - DNA, 444 bp, Oryza sativa
  unsure (1)..(444): unsure at all n locations
tagatctcaggcaatagattattcacgttcgggttgcatttttaaatnttggngcttantttatcttgtgcagcttggacttatagtaagcttgatttaatatttgtgggttattattttatcgctttggcccaatgcacatcataaacatgtggcaagaggcaaactgtggttgtgttctttccccacttttctcaactcacatctctcggtttctgcgcgtacgttntctaaactatgaaacagcgtgtattgtgcaaaaaaagttatatagaaaagctattggtaaacatcatattaatctattttttcaagttatctgagctaatgcttaataaatgattaactaactgtcgctccatttctcgaactcaaccatatattctctcatgatttgtttcttaacaaaagaccatataactatcatattgaaacttatatcta

SEQ ID NO: 77088 - DNA, 332 bp, Oryza sativa
tgcggcatgcaactttttattatacaatatttctggggtatctgaccaaccaccaggttgaagctaaggtcaataaactcaaggttgacacaattgctcagtgatgatggcactgttccattaatgtaattgtttggcaggagaagtttccgaagtgacggcaatgatgagcacagatccggcatgatttcgccatcaaactcattggatccaagatcaatgacttcaagcaaagggcacctgtaagcaagtgcaggcagtggatttgcccctgtaatattgttgaacggcagccgcaacacacgaagagaaaaaatgttggtgatgacagt

SEQ ID NO: 77089 - DNA, 224 bp, Oryza sativa
aaaataggccagtgggcaggctgatcaacgatactctattaagatttatgacaaaactgtcaaaaacccaagggtggaggcataaccctactgatattgcatgctaaataacagattcttacagactatggacttgctaataaagaaaatcattcaatgagtccctttgaatgagaaaagattttatgaaataaacatttatgcaataatacagaaacctgata

SEQ ID NO: 77090 - DNA, 461 bp, Oryza sativa
  unsure (1)..(461): unsure at all n locations
ctgangcatgcaagcttcttagtagataatttccttnctctgttatagaataatccgacaacgggcgagttgataactctcatcggccgatcccaggactctgaagccgacactgactctaggccgatggtgacttcgggcttaccaaattttggcgttaacacatgccccccaatttttgagtatgaggtctcatgcttcaaaattatcttctgtccgatcttggtacctccaaaattgatcttcctttgcttcttccaatcggctttcatgagccgatactgtctgcattagataagctaagctgtcaaactcatggcaaaagaatctttctctgataggtgttgatagcccttggaacgcaagatctgctagctgctcatcgcttagacttaaactataacatcnggtgcggacattacgaaatctgtgaatatattccataaccgattctccttcct

SEQ ID NO: 77091 - DNA, 482 bp, Oryza sativa
  unsure (1)..(482): unsure at all n locations
ttacatggttctacatctacatatagagctatatcctatttgatcaatcattaaaaatttacatctattatattgataaaagaaagttctaagaacctattccatatcacagttcacttcataactgcatgcataatcaatggaggaaccatcatacttgacatttcatctctgttattgtccaaccaattgcatatgaaccaaatcaacttgctagcctttttgcaaattaagcagntgatagatataattttctttttatcatgtaacatgatcaaaacccagttaaattccagagcacacaacacaagatgatattgaaaatgaacagacacacttttgcgcatataagaagctcatattttttaataaatatcgaaattggaaacgaatcaagtcaattttatcttgccacttgttgaaaatagacaaaattattaagaagtaacanagcgtagactagcttccactgtcagttattc

SEQ ID NO: 77092 - DNA, 458 bp, Oryza sativa
  unsure (1)..(458): unsure at all n locations
tgaagctngcgcgaagccatcactagagcgtattctatctnttctatttcaatggaccttgtcttcgctccttgcagtgcttcggagacaaagtagaccggtttctatccggactctgtttctaggatgagtgttgcactgactgccaccggcgaagctgccaagtataatagcagttcgcttcctgggggtgggcttatcagagctggcgggctttgcaagtattgctttagctcgtcgaatgctgcttggcactctggtgtccaattaaactttcccgcgccccggagggtcttgaagaagggcaaacctctctcggccgcctttgagaggaatcgactgagtgctgcaatttggcctgcaagcttttgtacttcatgtacgcttgatggaggcttcatttgctggatggcatcgattttctcgggattcgcctcgatgcccctttcggaaacaag

SEQ ID NO: 77093 - DNA, 402 bp, Oryza sativa
  unsure (1)..(402): unsure at all n locations
tagacgatgatcaaagtgggataaatggagtaattgctaatcatatgcatcctcgatgcatttgtaccgtcgtataacagcacaagaagaggtacgatgtgctaaaatatcactgaactttgctaatgtactgaacggtgttgttcattcaattgatacacctagataattcatatgatgccttcataagttcattttcattcgcacctgaactctccgagccagcaattcattattattcacattgatattgtaataaataaacttatatatctcactcacactcatatatatacacacagtccaagacctgctcacacctcacacccatatgtatcaacatccatgatcaagttgtgccttgctactatcctactacatagatatacaagntatcacatt

SEQ ID NO: 77094 - DNA, 445 bp, Oryza sativa
  unsure (1)..(445): unsure at all n locations
agcttctcaacttggtggttcgatcttccttgngtatttagattcaaagaagttgtgttcgagccttctcaacattgggtggttcgacacttcctttctcaagggggaatctcatgacaaataaagtgtagcgagtagaagaaaaaagaagtacggcgatatcaagcttggctggtcttcttgtgctgaaatcacncctggcatttaacaatgtcagtagtaggcaaacagcctaacactgtcaatgaccgcataattccaactcgagtgaaaacattgcagtatggccgtacagtggagatctggttaaaaaaacagtaaactagtgaggagacttcaaccctcaaaagtattactattagtcagtaactcctcaacatttctgcaaaacactgtcctattgtacaagcaggcatggtgaacagaaaataattattgacataaa

SEQ ID NO: 77095 - DNA, 422 bp, Oryza sativa
taaaaaggttcaatcttctcttctcctctagtttgattattggaatgctttcctgtgttcatgtgttcatggttgatggcggttaagcggcgatgaattgatatcactgggttctaggtatgccgtctgatcatccatgttctttcctcaagaaattcgcttgtctttgtgatctagaaaactcttgctgctgtagtgatcaattaaaagaccatcatgatatatctgccgaaacatgaactaaataagtgatcttgggtatatctcgagcactactattagttctatcctttacatgccatccaatctatacacattcatagaaacaatccaagtccaaccttactgtcttgtataatcaaaagttctggattcgaacgcaacgtatggcagtgaaaagctttcacttaattgtatctcaa

SEQ ID NO: 77096 - DNA, 457 bp, Oryza sativa
  unsure (1)..(457): unsure at all n locations
cagctgcaagctgcatagcacatatctaagtattgtcnttataggtgcctttgatctttacagtaaaataaagaaacttacttgacaccatgtgcattctctgtcaagctaatgccatcctgagacatgaaagcaaatcaacaatatgattcctatttcttggatttaatctttcactttaaaaaatattgtgtaattcattcataatatattagccaattaaacctgtgacattacagaagtatcgtttatccacaaaaagaaaagggaaactaaacacatttcacagtaaacatatctagcaaccaataacctacaatatgtgtttttcttttttgcgtttagcaacagaagggttatagaggaaattcaagaatgcacaagttcctggcanagcaaaggaagtacttctgaataaactataaaataaattttgtaggatagtagcaccttttta

SEQ ID NO: 77097 - DNA, 373 bp, Oryza sativa
  unsure (1)..(373): unsure at all n locations
gacctataaatctaagcttgaggtanggtcgtggggtggcacgatttgcgttgtgtgtgccggcgacggagacagaagcggcgctggtagtagcaggcccgatctgggttcatgcaggacttgacttggtggaggtcatggtataggagtcgggcacggttcgatttcaatacacatggcacggacgaggactgtattcgttttggaatcggagtcaagttttacccaaaatagaagcagcagggattccacaggattgcagagattgcaatcgaatcaaaccaaccaaagcaacgaagagatcgtacccgatttcttgggcggcggngggtttgggcgacgaactgcgagcggtatgagcacggcttggtgt

SEQ ID NO: 77098 - DNA, 457 bp, Oryza sativa
  unsure (1)..(457): unsure at all n locations
atgcaagctttagatgattatcttgctagaaacattaatattttgtgtgatcntcgatcggcggattcttcttatgaggataagtactctcaattcctagtntctcgccactttttgaatggacttgatatgtcaatttgggagatgaaagtaacttcaattcaagaatcagctgatatgctttgcttgactttggatcctctttacacaaaacttaaaacccatgagatgaatattctttctcaaaaggttgattctaagtcaagtgctttgcgttcttcattggatcttggtgctatttcatcgaactctgtctctctttattccattaatgccttgtccgatgatcaactcgaatcattcgaggacgaggatttggctctggctataaacgagttgtctcgagctatgaacaatggtagggttgagaaaagaggaggtcgaattctatgttttg

SEQ ID NO: 77099 - DNA, 196 bp, Oryza sativa
  unsure (1)..(196): unsure at all n locations
ctcagctggtcgtagtgggcggggattacgggagaagcacgtgattgttaatgcagttaattnttaaatcatgtttgaccatttattttatttaaaaagttatatattcatcatttcatttattatgatttattttatcattagagttgcttttaacaagagtaaagtccatcgccggtccctaaacttgtaccgc

SEQ ID NO: 77100 - DNA, 457 bp, Oryza sativa
  unsure (1)..(457): unsure at all n locations
tgtataagctcacacacactntcctttcctccactttccgagcttgaagtgctttatacacttcatttggctgaaacaaagtacattaaactntgaataagaattttatgacgaaaccaaaagttggttagacaaattcaagccaaaacatctgccatctgccaaaacaaatatttcgacagcttgacaaactcatttatctagagatttctgatgatggcaatgctttatgttttgggaatttgggatagtgtgttgcatcataaacaatacaaagaatgtagctggtatggtttccaccgtataattnttcctggctgtgtgatgtttataatgtctgctaattactcatgagggtgtgcaaagaacactaatcagcatatgaggtgctntaagaacatataaggtgcttgaacaatcttgatgtagtgcaatacggtgagcgactcttgatcta

SEQ ID NO: 77101 - DNA, 441 bp, Oryza sativa
  unsure (1)..(441): unsure at all n locations
ncaagcttgcaaaattattatgaagctacgcgtctagaaattgatccctatgatcgaagttatatactctataacataggccttatacacacaagcaatggagagcatacaaaggctttggaatattatttccgggcactagaacgaaaccccttcttaccacaagcttttaataatatggccgtgatctgtcattacgtgcgactatctccactatagaaagaaaaataagaaaggatcaaattttctagtatttactagaaaagggggctttctacatagggatcgtcaaaacaacgattttgccctatcagctgtaggaagaaaggacacttcacgagaatcaaaataggaagaaagaaagtatggcctatactactctatggatagagttctcaaattgatagagaaagcaccgtaaagatcaattagtgaccgact

SEQ ID NO: 77102 - DNA, 372 bp, Oryza sativa
tggtctacaattcccgacaaattagccctttatgattatattggtaatattccggcaaaggggggattattcagagcaggctcaatggacaatggggatggaatagctgttggatggttaggacatcctatctttagagataaagaagggcgcgaactttttgtacgccgtatgcctactttttttgaaacatttccggttgttttggtagatgaagagggaattgtgagagcggacgttccttttagaagagcagaatccaaatatagtgttgaacaagtaggcgtaacggtggagttctatggtggcgaacttaatggagtaagttattctgatcctgctactgtaaaaaaatatgcgaggcgttcccaa

SEQ ID NO: 77103 - DNA, 434 bp, Oryza sativa
  unsure (1)..(434): unsure at all n locations
agcttttgacttagtaatttatgttaatgcaagtatgccatgtttaatctctaccgagctccacatattaaaaccttagagtaggaatcaaaaaggcaacaattggtgaggaattcattttgatacacttggagagactgagttaatcatttgaggaacttggttttcttttgcaaaatcatttgaaaacttccggaataagagttgaataaagattgagtgattggtgctctaattgatgttatgtctttcaactgccaaagattatttaatctgagagagagtacatataccttgcacctgtatctttgagatatgcagcatagtagcaactcctgaccaacaaccaagtctttgtttcctttcgtccttcactcgggacgagcaaaggttcaagcttgggggttntgttgacggtcattatcgatcagttt

SEQ ID NO: 77104 - DNA, 394 bp, Oryza sativa
  unsure (1)..(394): unsure at all n locations
ntgctacgtgaatccgaganaaagaatggagatactgtatttgacgtacgtacccaatatgccagtgcaaggcccagcagatctcagagtatatatgtgctgatatcatccaccgctggtggtggagaggagatggtgctaacaagatgtctcctgtggcgtcgtcgaagcccatcgacgccggcggccgcgtggagccgaagccagagccgccgttctgcccgtagcctcgtgctcgtccgccgatgagccggacggacaccaccaaacacgagaagcccatgtcggcgctcgcattcagccattcaccaaccccacgctgacgtacgacgatgagtccatgacgccgccatctccgtcccagcagcttccacccaagatccatctctcccca

SEQ ID NO: 77105 - DNA, 442 bp, Oryza sativa
  unsure (1)..(442): unsure at all n locations
agcttgaaacttcctattctaatcatgtaatacttattcatgtnggaaaataaaaaacctgttatttccttacagataagatgtcagaagttaattaatgaaaaatgaattagtggcagaacatgtttgtgatagtaggcctacctggtcaaaacaatagaaaaacgaagctagtgattaagagcattcaatacaaaagcatattgagcattcatatgtttttctgtttaatatcgaacttaattaacacaacaccttgaatagcacattttttaagaatgcattatagctttagaaatctgataagtcaaaagtattgtagtagatgcagaaaattaatcagcaaaacaagaccaaactttacatattgtttcgagagaggtttgtgcatcaacagtccactctgatcaagattattcggtgagaaatggctggaagaact

SEQ ID NO: 77106 - DNA, 450 bp, Oryza sativa
  unsure (1)..(450): unsure at all n locations
ggttaattagtgctggttttccagcaccaacaggaccatttataagtatgggccacttctggttaactgccattaaagctacctcgtaactctttctcaaagtagcagtgagcacaaatggactaacagagggaacaattgaaaattagtgtaagcaagatgagtgcagcgagaaaaacagaaaaatatggaaataaaggaatttgttcacaccatatattacttccactgccatgctgccgtcccacagaaaactcatgccaatctggcaaagaatcagccaaacaagtgagtccatctgcatcagttttacaatcaacttcttcggcttgaagatacaaagaggctntctccaaggaagtatctgtgcaaaactccttccatctaatagcataaccagctattataaacttatgtngatcaacatccaggggaaacaatacaagaaaa

SEQ ID NO: 77107 - DNA, 401 bp, Oryza sativa
agcttgttagaggcaaaagagaagacaaagatggtgagaagaccaacaacaacaagcccaacaactacaacaagtcaaagggttctaaccaagggaggaagatggagaatcttatgaaggcttttcaacaagtttgcgccgctttcgagccactaagtgatgtagatggtgaaagtggagatgatgataagggaaagaatgtctccgatgtttgcttcatggcgcgtggtgaatctgacacagagtatgaagataatgaggtgagtgcttttgatgaagctattaatattttaagtgctaaaaataaaaagtgtgagaagatgtataaaaaacaggaatttatcattgaatctcttaaatctgaaattgataggttaaaatctcttattcctaatgatgat

SEQ ID NO: 77108 - DNA, 459 bp, Oryza sativa
  unsure (1)..(459): unsure at all n locations
tacggacacttaaaactcagctttacagntaattttagtgactccttcccatcaggagtcttctcaaccaccactttcctggccagaatcttatcttctgaggttttcaacctctcctcacaaatgatcacattcttccctttagctccttcggcttgttccggccgaatgagcatcttggcgttgttcagatcaatggtatgaactgggaatggtatcttgtcaacttgcatctcatacaaaaccaaccgtccttcattacttgcatgagaagaagaattatgccatttgcaatatgcacgctttaactcctcaagcaacggtattgtatcagatagcttgatgttctcctttttaaccaactcatcaaatatgcgatcacacttagaaacatcanaggtaaaacggacttcttctttctcgattctttgagtcggcttaagtgatgaacaagaatat

SEQ ID NO: 77109 - DNA, 436 bp, Oryza sativa
  unsure (1)..(436): unsure at all n locations
agcttattctcttttcaatccaatcgtggattntatgcctgtcatacctgtactcttttttctattagcctttgtttggcaagctgctgtaagttttcgatgaaatctttactactctgtctgccaaattgaatcatgtattcattctaaaaaaattcgaaaaatggataagagccgagaagtcttatattatgaaccttcgattctaaaattcaaattcttctacattgaatgtatagctgcagcaataaatttggatcagcctttctactccctgcatctacgttgagcaggtatctttaggtaaccgcacaatacctaacctaatttattgataagagtgcttattataaatcaattcttgcaatttttttcaaaaattgatttttggcattttaggtgtcaaaataaacaaaacccatcctagtggatttgg

SEQ ID NO: 77110 - DNA, 393 bp, Oryza sativa
  unsure (1)..(393): unsure at all n locations
ctcggcaatatggcgaacaagaaactagtctgataaatttcttaattaaaacacatacaggttaaactaagtatattaggcataacaagcgtttcgatcttgtagagtagataatcggattntgattgagttatttctctaagggaaaaaggaaaaggaggattcaaaatccttttttcttcggactttcccaaacacaagatacctccttgtattcgcactctctaatgagagtggaagaaattcgactctcatataatatcttaatagaattccatgtaatgatcaatgcactttttggattctatattattcgcatgtctagaatcctaccaagagaataccccccatntttatgttattgaagtaggattgacgaataagatataaaca

SEQ ID NO: 77111 - DNA, 434 bp, Oryza sativa
  unsure (1)..(434): unsure at all n locations
agctngaacctttgctcgtcccgggtgatggacggaaggaaacaatgacttggttgttgatcaggagttgctactatgctgcatatctcaaagatacatgtgcaaggtatatgtactctctctcagattaaataatctttggcacggtggcttacccttacccctgattcccacgagacactgcttctccttggcttgggcggttggaagacagaacagcaattagagcaccaatcacccgatctttgttcaactcttattccggaagttttcaaatgattttggaaaagaaagccaagttcctcaaatgattcactcaatctctctaagtgtatcaatttgaattcctcaccaaatgttgccttgttgattcctactctaaggtttatatgtggagctcggtagggatcanacatggcatacttacattcaca

SEQ ID NO: 77112 - DNA, 435 bp, Oryza sativa
  unsure (1)..(435): unsure at all n locations
tctccaccatctcgctgctagccaagttgttgcagctatcttcatcaatgatcatgcggcaagaacgctctttgatgacacactntgttcggaacaacgtgtgtcgctgattntgctccaccttctccatttgtgcgctgaggacacgctgtacaatgaggctctcatagcgatccgtatcttcagccccaatatgctcttcaagtggctcattatctgcatggttagccgcaagcaaagcaagtgtatcctcatcgaaatcactagcagagtagtactcaccatcatttnttactaccaaaactcgtttgctagggcagtcacgctgcacatgcncaaagacctctcaacagtggcactgaacatctcttgttctgcccgtggatgccattgaagaagcatttgctgctagctaagtagtctttgtcgctgagt

SEQ ID NO: 77113 - DNA, 466 bp, Oryza sativa
  unsure (1)..(466): unsure at all n locations
tgaggcatgcaagctntatttagactcagttaattacatcgttgatgatacaatttaactgagtcatccccggcctccgcataaaatgcacaaagccaaaaaaaagaagaaagaaacaactagaacatctcctaaacacaaaagtttgacagaaatatatatcttagtggctatcaatctgtaagttagaccaccacccatgctccgaacttgattaattattcgattaaacaacagacgcaccaaggatgaaaagttgttcggttcattttgtcttactgagattagaactagtactacctgtcccatatctccaaaggccaaaaatatatatatgcatgccaatcagccactttgccaaacaaattaattaactaattaagcggtttagttcgtacatgagataatggaagggaaataaggtgccgtattattaatccatgcagtcgtgcatgcatatacgcat

SEQ ID NO: 77114 - DNA, 437 bp, Oryza sativa
tgagattgagcggcacgaggagaacggggtgtggcttgtttatgtgtttgatatccaacatacgcacgaacttgctaattcagaccatgttgcttttttaggagttcatcgtgtgatgagtgattctaagaaagcccaagcggtcgagcttcgcatgagtggccttaggccctttcaagtcatggaggttatggagaataaccacgatgagttagacgaggttggttttgtgatgaatgaccttcataatgtctttactcgggacgagatgaagaatatcaacggtcatgatgctgaagatgtgttgaaatatctaacaagggagcaagaagaagatgcagaacttttcttctaatcaccacggatgaggaacggcgcttaagactgtgttttggcagatgctgatcacgtcagactatgtggtttgagggtgtgga

SEQ ID NO: 77115 - DNA, 259 bp, Oryza sativa
gaatcttgtatattaataagaaaactagttcatcctcatctcttgttatacatgacagcattattcacgattctccctgttataaaaataaatgtcagtgcgatttttattaccatataaataatgtcactgtggtaactatgacgccgatttttgaggacagagtcgaggaagatttcctttaagtgcataaccccagcaaccagtctgtacatttttgacaaacaaataagggtacgacctctgagagcggatgttg

SEQ ID NO: 77116 - DNA, 366 bp, Oryza sativa
ctaagcttatacatcatctgtgatagaaagcaaccaatacctcttctttaatgttagcagcacgattctcagaagcatcaagaaagccatcactgcattttactctaaagcactgacatcatgctgacacaccaaaaattgttagaacgcactgtgctgaagatgtgtctcagatctgactggagaggacacaagtgcatccgctaaaagatatgtgatgatacccatgtgagcatgtctgttaaaaagatgacagctaattgagcacgcagggcaatggaggtgatatcatgataattcatagaagacaatagatgccatctaaccctcacagacgaatgaactttaccctggaacactgcagtc

SEQ ID NO: 77117 - DNA, 287 bp, Oryza sativa
  unsure (1)..(287): unsure at all n locations
agctnttcaggtatgaaatttctgaattttttaagctgtaaaagtagttgtaattgaatcaatcacttgggaaaacataaggaagtacaaacacagcttaaattgggtgcaagttgctaagcgacagacataacagccacttggatatagctagcagagtaccaaccaagcaaaactcttaagctgaatataatatatgttcagaattcttgaacttgagttcaattctctatgaatgaggggatctcaactctcaacttgattaatgtaacctatctttggttttg

SEQ ID NO: 77118 - DNA, 482 bp, Oryza sativa
  unsure (1)..(482): unsure at all n locations
gcgagtctatgactatcggtttggctaggaagtcaactttcttatttctaaggttaacttccacgcatatttgagttgcccttatattccttccaggggaatgtactatcattggtacacgcaaattttgggttttccaaccatttcttttcacaaaagcttgcgatatgaaagaatgggaagctcccgaatcgaacagaactattgcgggtacggagttgacagagaacatacccatcacaacgtctggagcatcctgagcggtttctgcttgaatgtgattcacacggcctcgaccaaagttgttggaagcacgtgaaccttgtccacttgcctgagagctatgacgagactgagctgccgcttgagtangagttctggcagtgctaccattancatgccctgagttggtgttggaggaatctgaggacactgtctatcatagtgacccatcttgttgcaccggaacactgaactggtga

SEQ ID NO: 77119 - DNA, 431 bp, Oryza sativa
  unsure (1)..(431): unsure at all n locations
agcttgttgtacttcactactatgngattgtcttctggaaggttccaaatatgtgttaaagttgtccttccacgtttgtcttctttggcactctcacctgtaaaattaaacaagaacagtagtggctaagcccagtttttcaatataaacatttagttggtcctactagttttagctttcttcattgtattcgtacctgacatattcaaggagtcatcatcttgctgctctagttcgatctcatcatcttctagtgcttgtgactcatgcaatgggttatgttcactgatattgccatctccactcttgtatttggcactgatttttactacattcaaccttttcgttcttgccatttcacctggaaattggtgcaatgtttctggaaaatatgctacaaaatgaagttatagtaattagtgcttttcatg

SEQ ID NO: 77120 - DNA, 409 bp, Oryza sativa
  unsure (1)..(409): unsure at all n locations
tcaggctttagctgccacagatggtcaagcttgactattgagtgatcttatcatatttgaaaaagtatcagagagattatattntctatggtaaaacttgataactttatgaactagccttagtggcatgttctattattgtggttgggaacttgagatccttggttgagaattggagctacgtgtagcagtgctcaactacatctgcattatattgttctgcatatggctgtgttcggtttaagtggttgggaacaaatctcccgtgcacggaaaacggagcggtttattagcgtgtgattaagtaagtattagctattntttataaaaatgaatcaatatgaatttttaagcaactttcatatagatacgctttgcaaagacgtaacgttagcagtttgaaaacata

SEQ ID NO: 77121 - DNA, 421 bp, Oryza sativa
  unsure (1)..(421): unsure at all n locations
agcttngcagatcccttatattggnggcttttcactcaacctccttttcgccaagacgctggacgacatgcagatccctcgcacggaattaaagccgagtaatgcgccctttcacagagtcatcccggggctatttgttacaccactcggccacactctttctattactttcagcactcgggagaatttccgtacagagaacatcatgtcatactcggacgcccggcgttagccaagttcatggctgtcccgcactatacctacatgatgatgaagatgcctggtcctcgaggagacatatccctgcggagtgacatcaagcaagccgtcacatgcgacaaggaaagctgtgagatggcccagacccgcgagatcacgctcgcccgagaagaaatncgactggctacgtccacagcaagcg

SEQ ID NO: 77122 - DNA, 368 bp, Oryza sativa
  unsure (1)..(368): unsure at all n locations
tcacgatcgcattggtttttnttcaaacaataatcaacatttgtttctatgnttttaagttatttctaatctaatatcattggaccctgtaaatttgaagggttgagaatacacaaatctaaaagttcatttagaccaagccaccaaggaagatcgatatatgatcgttgcatctgcagtaccgtaggtatttcttatttccttgcaattaagaagatctatatgtggtctcatccacaaatcaaaaaatggttaaagcaaggaattctgtagcaaggcatccgacggactttgcataattaanaaaaagagtaaaatacaccagcggtatttaaacttgtcatgaggtttcacttatggtccacgac

SEQ ID NO: 77123 - DNA, 388 bp, Oryza sativa
  unsure (1)..(388): unsure at all n locations
agctntataatcgnagttactaaatgcaatacgtctcaacaatgatgctaaaaacatacctaacctcgcctccctactggttataatgcaatgcagtctatcagactcatcagggtgccattttgtgcatatgcggactcttatgtttcatatctctaacctgtgggtcctctgcttaatccttaaacaacaccagcaactcctgcgctttcatcttccatcgaatttttcatgttgccgctaatcagccataaaatcatttgcagatgcgctctgtcgaagtagtctcataaggttcgtttatagatcgacggcaatgtgagttaccttttccatactaattataaaaagacagtacaaacaggatcattatggactccacgctcat

SEQ ID NO: 77124 - DNA, 427 bp, Oryza sativa
agcttgcttctcaaatatttttttttgtgtttacttcccaatatattggcagaagaaaaccatgcaccatttccataggcctatggaacacaatattactcaacagtcaacaaatgccgcagtaaggaaagttaaaaaccacatatttttacaagagctacagtttcagatctaagttcaataaaaatgccatagcatataatctatccacagggagggagctctttggtggctgccacacaaagggtatatggccttcaacattccaaggcttggttttctctcttacagcgcctcatcctcttgggctgaccgactgccatccttgtgccatgcggagtttgattcttgaatcatcttagcagttctttcttgccatttctccatcattttcatctcacgtaagccagcttcttctatgctcatc

SEQ ID NO: 77125 - DNA, 418 bp, Oryza sativa
  unsure (1)..(418): unsure at all n locations
ttttaggatgcagatacaccanaggaagaaaagataactatgtgttacttatcaaaaatcattatagacttgactaaattcaatgccatgggctgatgatagaaaaaagctgataatgatcaatttagtatgtgcatcaactctatgattntgactggaagggtgagatttggttgttgccagtccatgtgtaacctagtaaactacataattttgccggatcctttccttgaattcttcaatggaaaccatttaaaccaatgtacatatttttgctgatcatgtgtaatcgcgtaaactctgtggtggacagcagtcttaattaaattgtgacaaaccttcaccacaagtctcaagatgattccctgatgctgctctgtaacatttgatatgttgattaaaagatcaggtgctatgc

SEQ ID NO: 77126 - DNA, 437 bp, Oryza sativa
  unsure (1)..(437): unsure at all n locations
agctttaagtgcacatctttatcgtatatctttatgtctggaaaatattcggaggtatcttcttcctcagccattttgtttccaggaggggtgatatatatccttggagcatccccaagtagatgaggcccaagcatgagacgttgcacctcattatttcttacgcagtattgttcaaacgaagtatatgcaagctgaaatgcatcccatgcatggctgcatgagctacaaacaggaatacacaattattggataaatacacaaaacttaatggcttgaaatatattcaacaaatgcaagatggacatgagatacctcggaacaactgacatcaaggaatggcgaanatgagatgctgcaaacgatgataatgaatatcttcaatacattatatatgaaatcccctagcaatgaaagagtgtgaaattacaatatga

SEQ ID NO: 77127 - DNA, 450 bp, Oryza sativa
  unsure (1)..(450): unsure at all n locations
tcttcttgaacacccacttgcaccccacagggttacacctatatggtcgctctgtcacctcccaagtcccgttagcgataatggaatccatttcactacggacagcctccttccagtagtctgcatcaggagatgcatatgcttctgaaattgacttatgagtgtcatccacgaggtacacagtgaaatcatcaccaaaagacttagccgtcctttgtctcttactccttcgaggagcttcactgacatcctcctcagagacaagttcatgtgtatgttcagtttgttctgttggtgtgaatgaactgggaattatttcagagggttggttcgaaccactatgtgtatccttcattgtggaaaagctctcaaagaaggtagcatcacgagaactcataatngtaccaacatgcatgtgcggtacctcgggattaactattaaaaatctat

SEQ ID NO: 77128 - DNA, 290 bp, Oryza sativa
agcttggtcacgccgaagttccccgaccctatgtccttgatcacctcgtacctctccatccccaccttccacgacaactcccccgcacgcacaagcgattcttgagaccgcccaaaccgctcggcctcagcacaccgccctgaaagcccaaagacaagggcagagcaagaagcagagcagctgctgctaatccagcagagcaaagaagccaagaattggagagaccagcgagtggactgcgagagaagaggaggaaggcgtggaatggtgcggtgtggaaggggaggagg

SEQ ID NO: 77129 - DNA, 446 bp, Oryza sativa
  unsure (1)..(446): unsure at all n locations
gttgataagtcggaatataaggatgtccagtgtctgcttattgtcattgcaattactgatccatggatgacctgaaaacgaaatataaagattactaagaacaattcatcattcattggaatccatatggatagaatggatcttacttaaagcctgtgctgcagtcattcttctacgtggatccttgcaaagcaagcgcttaacaaaatccattgcttccagagtaagagaaggccaaggtgcctcattataactggngtcagctttgagaacggaacggaatatgccagattcagtgcgtgcccaaaatggacgactgccacataggagaatatatgcaattacacctatactncagacatcagcttctgtgctatagcatctgtgcagaacttcacgagcaacataatangcacttctcacaatatcatttaacctctcatctg

SEQ ID NO: 77130 - DNA, 433 bp, Oryza sativa
  unsure (1)..(433): unsure at all n locations
agctttgttttacaagacttacatttacaatacgagtggcttggccgagtgcctttttaagtaggcatacttcctcatcttcttttttcttatttatcacaattccctatggttgcatgtcgtcatcccaccacttgactaaaatgggtgggcgagaatcttcagctgactgtatccggaggatctcttcttcgtcgccgatcatcgggccttaggcattcatgaataatggtgaaacaattgaagaaaatctgttgggtcaaagcagatttgaagggtttgcttacctgttgtgattaccggtcggggacgagcaggtccttgtaccctaacaggagatctagtttcaggatcagcaccggtgtctgtcttgggagggctattagctngagcttctacttctaggatatctttatctggctctgtacccgac

SEQ ID NO: 77131 - DNA, 417 bp, Oryza sativa
  unsure (1)..(417): unsure at all n locations
ntattatgccattcttccaagaatgtgtattttatattgatataactgcagcatgtgtgcccactgtatgtgcttatatgacctgacacgttatttgctctctttaggtgtacataccttggatatgccataaactagatacataaacaaatgacacctaaagggtatgccatatattcagtttaacagtaatagtggttaccgagtaattgagacagaaacaggttaagttggtgtgctcataatattcaaatgactctcatcctattggtgaatatcttatgatctgacgaatcattggtgaacagtgaatgtaagacccacagaagcaatatggcatatttacactgtgccttttgtaatcactagcctggagggaagctgaactactgacatatgctacaatttatgcgtcaa

SEQ ID NO: 77132 - DNA, 395 bp, Oryza sativa
atgttcggcgcagtactaatactggaacttatgagcattatttttctattattcaccatctactttagacatatcttctgataactttttcaaatccaaaagtccagtatcttcctacaaattagtgaattaggaggagctctttgtgccgaataagaaagagcacggcaatatttcaaacttgcattcgaactgcgaaatatttatacaaaggaggagagatcaagataatgcagcagggttggttatctaattggctagtcaaacatgaggtggttcatagatctttgggcttcgatcatcgaggaatagggactttgcaaataaaagcagaggattggtgatccattgctgtcattttatatgtatatggttacaattatttacgttcccaa

SEQ ID NO: 77133 - DNA, 489 bp, Oryza sativa
  unsure (1)..(489): unsure at all n locations
ctcaagctgaataaaaaatcagctagagaactaatggngaaaattcacaaatttgttaaaaggggatagaaaagagtcgatttgagttgaatcaggtatcaccaacataagagagggaggcgcacggctgggaggcctagctgctgagtctatcctcttccaacggtggcaacactggaggactcacagagcagcgacaaagatggaggctcagtgtctgcggaaggcttgaccaccgtggctcgacggggtggcgtcgccagcggagccctggaccactgaagcaccgattgcagggcgatggcggagctgcgacgctggtgggaggatgcacaaccagtgcgagacggtgcagcggcactggtggaaaccctggaccaccaggatactgattgcggtgacgacngcggcggaagtgcggatgatgactgatggcgcaacaacgttcaaaggcgcggcggcggcgttatcgtgaataggggagccacc

SEQ ID NO: 77134 - DNA, 158 bp, Oryza sativa
tttcttttttgtttttcctttattttttttttttttttttttttttttttttttcatttctctttttttttttttttttttttttgttttatttttttttttatatttttattcttttttttttttattttttttttttttttttttttttttttttt

SEQ ID NO: 77135 - DNA, 244 bp, Oryza sativa
aaaaaagaaaaaaaaagaaaaaaaaaaaaaaaaaggaataaaagaaaaaaaaaaaaagaaataaaaaaaagaagagaaaaaaaaaaggaaaaaaaaaaagagaaaaaaaaaagaaaaaaaaaaaaaaagtaagagaaaaaagagaaaagaagaaagaaaaaaaagagaagaaaaaaagagaaagaaaaaaaaggagaagggaaaaaagagaaaaagaaaaaagaaaaaaaaaaaaaagaaaaaa

SEQ ID NO: 77136 - DNA, 340 bp, Oryza sativa
  unsure (1)..(340): unsure at all n locations
gctattgcttatataaaagcaccccatnatccttttttttttttgtgaccatgcagtaattatttgaatgctcacgtcacacgaaacactcaaataacctggaggtaggaattctgggccctttcgattgcatggtacttttgggtccctgctgttacttgaataatgataagcggaaaacaccttgcatcttttaaggaaaaaaactactgaggccctcgtgatacattgatatgatacagcgaaacatgtaatatactttctttgattatgtctcattgctcatatgtacaatacttgcaggtgaggcaatgtcaacttgtattctcattgttaacat

SEQ ID NO: 77137 - DNA, 451 bp, Oryza sativa
acactatgacactaagctgctccttaacagatcacctaccaaatgcagttataattggttacttttatattgacaatggagaacgcgtagcatacaccacaatcagtaagaacataatagaagtctcgatgcctcccacgtctaatgttaaagaaacaacaaatctatgcatccttggactatcagttcctacctctagttagcagcaagcccatgttgggtcatgaagggcatttttcatgtccctactattgaaggaacaacaagtctatacatccttgaactatcagttgttcctcagcccctagttagctatatgaagttcagactcagtttcagcaacaatccagcaattaatgtaggactagtgttttccagtctcccagatcctagcaatgactggttgcaacatattgtgcttggtcactagtaatttacatgctaacactgt

SEQ ID NO: 77138 - DNA, 392 bp, Oryza sativa
  unsure (1)..(392): unsure at all n locations
tgtagcctnctaagaaacgagcaaggccgncatctatgctatggagtttggtctcttggaagcaggccaaggtgcactttgtgtcaagcatgagctcatggactgcgttgcagcgcgcacgtgagtttatgcctctcacattccaggagatgatatctagactttgtgccatttaaaaacgaagagttctctatatctggaccggcccttagcctcttttaaaaaaggccacttcggggcgcatggcccattaacgtttggcggcccaattcgcaagtctgtgttgaaaaggcagcctttgggcatgcgcggcctgatacgcacgcggcccacgagctggcgcatggccggtcttgtagtgcgcgcgtggcccangtgacgcatgggcagtc

SEQ ID NO: 77139 - DNA, 169 bp, Oryza sativa
  unsure (1)..(169): unsure at all n locations
agcgaacaggagaaggggcggtgtcgtaatgagnacgaaaccaacgaggcacgaacagcaaaacctgaccaccgcgccctcaaggagttcatcatgtgatgagtgagtataagaaagcccaagcggtcgagcttcacaagaggggccctacgcccaaccaaagaacgga

SEQ ID NO: 77140 - DNA, 416 bp, Oryza sativa
  unsure (1)..(416): unsure at all n locations
gactgccgacaagtgacaattctcagtggtcaattccatgactctgaatccaatatggttgctaagccgatgatgacctcggggcttactaaattatggcgttaacaccatggcagggtaattgtaacactagtagcaacatcatacacaacaagaggtcctgccattgctcataaccactgcttcattgatgttgctgctatcatcagatcccttagacaatgtggtacaatggaagtcatcacaaactgcagcaaccttttacaagacttaataacatcagccctatgaggtactttgcactatcgagggcagtcttgttgcagcatacaacacattattatgctacgtatattcataaatctattgcatcctaacacgaatcattngacatagtgatattactattaacaaca

SEQ ID NO: 77141 - DNA, 340 bp, Oryza sativa
aactctggagatctctcatcttgaataagcgaagactttagattatttttgggccagaccatagaatggagttccttaaaagctgacttacatggaacgggccagcgtgagccttgaacctgtcagatcaaaagatgtgtttgagggtcttctaacacatcatacatctgaaaactctacgtataactgggtacagcgatcctaactctacaccatggctctctagtaatctttcggctacatcactgtagacaattcatcttgataattgtccggagtggacaattcttagatcttctacaattcttcctttcggtaagtaactgaaattgcgcaatat

SEQ ID NO: 77142 - DNA, 468 bp, Oryza sativa
aaattacttcgaatcgaaacacaagttatgtctttcttcagccttaatctgagcatagaaataccagttggttcttccaattaagggaacttagcagtaaaagaatagtcctctgacaactatcacaaccaaattttaggagagagatcgatcactcctcagaacatgatgacgtatgtatctttatacaagttctgaaaataatcagttcagggaaatgactcatgaacttagtatagcagttgcagtgttagtgattgaaactcagaggaaatgcagaaaataagacataaattgatcagcagtaaataatgtaactaaaaaaattcataactgtggatgagcatgtacatgtgattcaagacaatgtaatggtgattggaattcaacgaggtattcaaatgatcttattctgacgtacctcagcgaccatgaaacagagcttattgacagtagaaaatatttgga

SEQ ID NO: 77143 - DNA, 358 bp, Oryza sativa
  unsure (1)..(358): unsure at all n locations
aaaaaaagaaaaanaagattatgataatatnaaaaaaaaagaaggggggaaagaaaaaaaaagaaaaaaaaaaagaaaaaaaaaaaaaagaagaagagaaagaggaaaagaagagaaaaaaggaaggaagagaaaaatgaagaaaaagaagaaaatgaaagaagagagaaaaaagaaaggagaaaaaagaaaaaaaagagtaagaagaaaaaaaggaaaggaaaaagaaagaaaaaagaaaagataagagaaaaggaaaaagataaaaaagaggagaaataaagaaagaaagaaaaaaaaaaaaaaaaagaaaaaaaaggaaagggaaaaaagaggaaaaaaaaaagaaagaaaaaaa

SEQ ID NO: 77144 - DNA, 264 bp, Oryza sativa
  unsure (1)..(264): unsure at all n locations
ctaagcttctcgggttcttggtctctgtccgaggcancgagtccaaattctatattatacgagctatagagcggatgcgccctccagcaagcttaaggatgtgcaatgcgtcaccggctgcatggcccgcctaagtcggttcatatcgaggctgggagagaaggcgctacccctatataagctcctcaaacgcttcgtgccgtatatctggaccgaagaggctgagcgggccctaacttaagtgaaggcgtaccttagatctcc

SEQ ID NO: 77145 - DNA, 290 bp, Oryza sativa
gcatcagggacaaactatcctgaaaatcaatttaatagtattatcatgtcacatctagtaagtaaatcatcgtgcatagtttgatttttaatttagaaccatcacacaaaaagtttcaataataagatggaagcaataacctgttcaaatttctcaaactgagaaatattatcatcttctgacaatggttttggagcgcttcgcttttccttttggccatcaaaagaagcatcattattcttccaggcatgtcgcctcggcaagaagcggcgaatgtccgtataacaata

SEQ ID NO: 77146 - DNA, 476 bp, Oryza sativa
  unsure (1)..(476): unsure at all n locations
ttgcaacccncaactgacagcacttaggggttatggtatttatggtatagatcacaagggagagccatttatntagatacagtaacagcacgtactatgtagcagagggacagatcgatgatcatcgatcctagtcaccgatcatgaatgtttcaagatgatcgagatcgtggtcaccaattgagagatgcatggttacatcttttagcttttgtttcgaattgaatcaaggaaattaatatgtaggaattgcgaataaaaccttaacaacttctcaattacatgaaagtcccacacaccaatgtatatatatatattcgtcaggtttcctccttcgacacatgttcaaatgaactgtgaaaaatcttactccaatgccaaataatacacatgtggtacataaagtactcatatctctacgcgtctaccgcagcatcatcaggcatgattcactatacctcannatttgcacatgc

SEQ ID NO: 77147 - DNA, 182 bp, Oryza sativa
  unsure (1)..(182): unsure at all n locations
cggggcctgccgccgccacaaaagccggaccggccaagcgcccggccgnacggcgagacggngcancaaaaccacaccggggaccccgagcaagaaccgccggacaccaggcgaagacggcggcgnacgcacgcacgaaggagacgagcgcggcntccgatatggccgccagaagaccaccg

SEQ ID NO: 77148 - DNA, 470 bp, Oryza sativa
ttatcaggtatctttatctcacttaatagatactatcaacgaaacattcacattcagaccattagactatatgcaaaactgttaagaagatccttacacaaagtaatcgtttggactaggcagcttgtatgtaaacatcaacttgtcatctactcctttaaattaagttaaaacagttgatgataaaaaacataacactgaacaaaggaattgtccatcaataaggagacagacacaggaacatatttctggtgatctaggtcaagttggaatttcataatgctgcgtagaatttcttattcataaactgaaacagaagggaaaaaaaatggcaaactccgtcaggttttcatctgatgaactagtgaaccctccccccccccctctctctctctctctctatctctctctctctggggggttaaagagcagtagtataaaattataatacccggtgcctctatatgctt

SEQ ID NO: 77149 - DNA, 413 bp, Oryza sativa
  unsure (1)..(413): unsure at all n locations
tagtcctaattaagatactaaatctccattccaacaaagttagatctctatacttctcaatagagnccaggaattgaatcatagcattacagttctgaattagtttctgcaacttagaaaggtttttactccaaattctcanaccctttctcaaagctttcaatttagcagaaatatttctagctgcattaaaatcatntccatgnatggtccagaataaatctacaagctcaaagaagccctcatggtcaacccaaaaattttcaaatctgaaaatatttgcttttggaatatcagtaccaatttgcacaacacagggggtataatgagagatatatctagccaagggtttaacccaaagtattggaatttaaagtccaatagtggatgtaaaaccatctactgctcaatag

SEQ ID NO: 77150 - DNA, 222 bp, Oryza sativa
ttgcagcaatgcttgcaagagattcctaggagatcaggaacaacataaatcaataaattgcgttgatatgtgtaggcgatcacaatatatcgcagaaggatacaaattacctttcttgcgatgacaggggaaatctacaatatgaacaaattttggctattggtacttcatgttcagggaagaacatacgcaacacattttcatattatttgcgctcaatgt

SEQ ID NO: 77151 - DNA, 355 bp, Oryza sativa
  unsure (1)..(355): unsure at all n locations
ctcgcggccagcttattaatatattatacagcgccacagacgccgatgaggtcaccgcggaagacgtgctcatcaccaactcccgcaggcgtncacaacacgtggaggcttgcaccacgaacgacgggtgggaggatcacatgagcgcgaggacgaaccgctggacgagcgatgagagctatgtcaccgccgctaggcagatctactcctcggtggaagagagcacgtgctcaaggctagcatgggccgacgagaggatcaacggtacgacgatgcaaaggagctaggtgaactacgctatggacgatgctgctacaaacaggtgcgagaatgataagtctgcagctatggaaga

SEQ ID NO: 77152 - DNA, 478 bp, Oryza sativa
  unsure (1)..(478): unsure at all n locations
ctaagcttcttccaagcatactgctttctagaaagatattactatctctatacagatggatcttatatgaatcgtatgatgaagtaccacatgagtggatatataggaaaggaatccaaatctgccgaatcgctcatgttatgatcttctacatcctangtctccgcgttccgtcatctggcttatgttcttcatgtagcattcagatcgaatgactctatgaaattacgtcgatacttctacatattatgggtaacgtaggagacatccctatattcccccgggggtcttaattaccactgcttagctntcaattcgcctctgaccatcaaattaaatgtgaataacccgtcctcctctctttgaaacaaggggcgcttccggttctgtgcgtgcttcannacaatttgtcttctccatattaccatatctctagagtcacataatttctatgaggaactactgaactcaatcactt

SEQ ID NO: 77153 - DNA, 194 bp, Oryza sativa
  unsure (1)..(194): unsure at all n locations
gagcggcggccagatgaattgaagcaaacacgacacccgaaagagccggagcaaggcaaacggcccgccagaacagccaacaaccagcaaaacaggggcacataacgacggcagcagaccaggagaacanggaagaaagcccggaggagagcagaaacagagcaccaccaagccaagagtccgacagcgcgacc

SEQ ID NO: 77154 - DNA, 452 bp, Oryza sativa
  unsure (1)..(452): unsure at all n locations
aactaagctacatagcacaaagcatctgaaaatgctttatgttttattacgagctattgcgctgaattacgcatgacaggagtgtgttatgccccatatgcctttgagtagttgtaatatatatgcactaagagtatatacatataatcatggctcgactaacaattccgtttgcagcgaccattggatagaatctttcttcttctatccanagtacaatgaagtcatcgtcttggattctctcgacatagatagcaacacctatcacgaatttctaagaattatcgatctgtaagtaagatattagcatgacgtgttttaacctctgatgaacgtaaattatttatatccgcacaacagtgcatttataaggtattaccaacgatgttgacaacgcataaactcaagagaacgcatattcgttcgcaataagtggccggtaagtacatata

SEQ ID NO: 77155 - DNA, 460 bp, Oryza sativa
tcattatgggtgcccgcacattatcatgaaggataccactaattataacaggaagcagctgtgtcataagcacatgacagtcatgagactttaggtttgtgaacttcttatccttcgtgcttattattctctttacattcgaggagtatccggacgataccttgatgctctctaggcattgaaacatactctccttctcttccttgcttagggtgtagctcgccggacttaagtaatggcttcctttctcgttcggttccggatgaaggccctcgcgttgttccatatgcttgagatcattgcgtgcttcgagtgtatctttggacttcccatatacacctaagaagcccagcaggtttacgcaaaggttcttagtgaggtgcatcacgtcgattgcgtggcgaactccaagaccttccaatatggtagctcccaaaaaatagagtttttctttcacatc

SEQ ID NO: 77156 - DNA, 231 bp, Oryza sativa
acaacaaagcgatagagctaattgtgagagactcatttcttgacacaactgtcgcttatgtaggcggttttttactatgatttgggctcagatgaagagctcaatcaataatccatagatattggctcttttcaccaataatgtggtaaatgcggtcaaggtcttgaggtccgtactactaaacattgctggataattgactgagaagttctcgttatatgtattattcgc

SEQ ID NO: 77157 - DNA, 329 bp, Oryza sativa
  unsure (1)..(329): unsure at all n locations
ctaaagcctgccaccacaagccaaggcagaaaagaagcttggtttagcgatgcatgcaaggaccacattctatgccgggtctcagaccttggttcaccataaacaaagagtgatggggcctcacatctggatcatttcacacgacaacacgagacattaggcatctaatatatnctatcactttattcctttaatatcaacataaacagactcatcctaatagagcgctagaccaccactcattccattacatatccagccagcaaatcctttaagtcccaatctatagcgaagacgtctcaccttttctattgtctgtcttgattaca

SEQ ID NO: 77158 - DNA, 323 bp, Oryza sativa
  unsure (1)..(323): unsure at all n locations
atcaattgacgcaacttatttttattttttcttctatgtaaaagaaagaggatgatgcaactcatgttacattttactttagtctgaatcaatatatctgaaaatttgaacagaacatacttcctcaattcaattgtcaaccaatgccactcaaactcgaaatgctnggcatgctggcaaaccaaatattgtttataaagtaagaactgttgaagtattctcgtagacattatacaaattaggagcaaggaaggttgcagtgatcaatgtgccattactcgggtgctgcccatatttgagaagtcagaacccgacctgagagt

SEQ ID NO: 77159 - DNA, 245 bp, Oryza sativa
  unsure (1)..(245): unsure at all n locations
tctcatgcatctcatttttgccactgcgttcatctgacatttattcttaacagtcaaaatgttaaaccaagatgaatgtacagcttagtgacataaagagaatcccttctctaattgttatgtggactagaatcanaggatacttcctaagctgactttggtggttttgtttttctctaggctgcattggatgtacctgctcctgtttgtaatctatcatacagcttgcaggttgtcccctctct

SEQ ID NO: 77160 - DNA, 443 bp, Oryza sativa
  unsure (1)..(443): unsure at all n locations
ntaggaanaccggaaggagggagcgttgtacgtttctctatttattattccgcacgcagcgcgtggattagcgctaccgggtatttgaacctttttttcctttttcatatgtgttggaattggaatctctggaccgaatttttttttatcatgccagcgacacatcaagactagttttgtatttgggccagccagtccatctctccttcactcttattaaaaattgtagtaagtccactttgattctcttaactagtggccaaatctaattcgaatcctgaattataataacggatatcttgacccccccaactattacaatcaatgcaatttgattcctcgacgggtttggaggacagtttcgctaacgtggcctttgacttggtcaacctttttttactgatgtggcaagctagtcataaaatacaagtgaggcccatatg

SEQ ID NO: 77161 - DNA, 408 bp, Oryza sativa
  unsure (1)..(408): unsure at all n locations
acactcagcctcagcttgcactataatatgtgtagcgcagccatgattttttttatgctgcgccgangacatgcgcactccacatgtcaacctaagggaccaccgtagaccgagtacacagagacggtccacgggtcgacagaagtggaccccgtctgtcaaccgaggcgagtggccgacaaacgaactccactagacaccacgcgagctgcacacgtggaaaccacgcggctaccgagcgggcacactaacacggtcaccacacgcacaagcgaacgactaccgacaccggtacacgggtaccggggtcgacaaccgcacaacgggtactgtgcgacaccgaaagaacgatgacggtgcagcgagaggagagatccttaccaccacgcgactaggcgtgggaacgac

SEQ ID NO: 77162 - DNA, 344 bp, Oryza sativa
  unsure (1)..(344): unsure at all n locations
cagccatagacttttgttgcggcgngccgttatgatttgttttttaancaggcacacgcggaagatatcccgtgagctatgccacccctgtcccgtctagtaacaagccaacaaccagtcaaaactgttttgctctttntactatggctagcaggacaccggtagaaaattggaagatagtcacgtaggagagtagaatatatagcaccaccaagccaagagtctgacagtgcgattcatgattttaggtttaccacttcaccttgcgataaagtattaaatataggttaaaaaaactaattatacatattgcgaataattgcgagatgatcttttaaggctaa

SEQ ID NO: 77163 - DNA, 389 bp, Oryza sativa
caatctaataaaggctactaccaaatatctctagttgacactctaacatatctagaatatgatggaatgctagctatcaagctgcactagtgctaccaatttttctctaatattattagcctgtggagatactggccaatttcaattcttgtgttttgaaccatttagttggagtttaaaagtgatccggtaacttatttttaatttatacataaccttagttttggccataccatgacttggtgggatgtgtgggcaaaactttattttaaaagattaattatcagacactttattgaattatattactagttcaaagaatgaacagaagtgtacattatgaactccatgattgataaacaagaacttatattacccttattcatggt

SEQ ID NO: 77164 - DNA, 186 bp, Oryza sativa
  unsure (1)..(186): unsure at all n locations
tcttaactgcacgatgccgaccgcgttacgtattgtggctcactgagggcagacgaccacaagacgggtggttctgtgtcccctacacagaactttccacgagccactgatgagtctgctgcgcattcctatacacatagggtgtgtatntgccatactggtgtggagcctcggaccgctgaacct

SEQ ID NO: 77165 - DNA, 105 bp, Oryza sativa
  unsure (1)..(105): unsure at all n locations
cactcaagcttaccggcaaggttntttctggcctacagctgtgtccgatttatacatttattgtgcggacatgcgaaggttgtcatatttttgtcagacaaactc

SEQ ID NO: 77166 - DNA, 480 bp, Oryza sativa
  unsure (1)..(480): unsure at all n locations
ctaagcttgtaagtgtgttattccggtcctaactagccaagacctcttcgggtttctacaaggtatgccacatggacactaaagtgacatgccacacggatattccggtcctaaattttctttttctttttctcatttttttcccacacgagtatgaacgaagaagagaagaaaaggaaagagaaaaatattaagaaaatgagttaacacccgtgtgacatgacacgtgagtgccatataggatctcaaaggtgtcgtggtaatttgacacgtgagtgccatataggatctcaaagatgtcatggtaatttgagaacaaaataatacactttaacaatattaaggacctagataagaacgaacaaattaagtgccagcaatacactntactcttttaaatgttatgtatgtagctaaattttttaggatatgatgctactgctgtagacacataagtgtgaacgtgtcttgttggagatc

SEQ ID NO: 77167 - DNA, 469 bp, Oryza sativa
  unsure (1)..(469): unsure at all n locations
ttacgtgacctatgaaactaagctttaaccaagctcttacaagatcttaccaatgctttcggtatggtgacatacaccgactcaaccaagcaccccaatggagtttggatgtatcgatgccttggcaaacacttcctgtacggctgcaattagatctatggagctctgggtaggcttaaatatgtagcaaagggatagcaaatgctcaaatcagataatgcaaagttgaataattgttcaaagtcaagtaccgtgctgatcctaggctcgaacgtactagagacgcgagcctagacacaagcgataccacaggatagcactagaaacaacttaggcacactctgatagatcatgttcagcttanagatacaactganntttttctttctttcttcttccttctttctttcttcttttttttctctcccttttttntggtggggcttttcttttattttttcttttatgc

SEQ ID NO: 77168 - DNA, 435 bp, Oryza sativa
acacttgaatactaagcttaactatgggtgaaactaatcacggttaatctttgttattgttcataaccgcgggcacggctattcgtatagttatactctgaacagaggtgtacaactgtacccacaagacacagtcccacgacacgtttccgtgcgccgacatgccaccacgacataccggaaagaggccgtgacaggacccttcgcataaccccctctaaccgatcgcaccacaccttatggttcgcccccgtccccagcaggcaacgggcagccccctttcgtgccgcggtgaatccggaagccgatcaaccggacaccccggtcgacccaactccattacgcccaccctcgtctgtgtacgtcggctagagaaaagctacactacaagcccagccgttgcccacgctggcttgtggtaagtacaatagttct

SEQ ID NO: 77169 - DNA, 457 bp, Oryza sativa
  unsure (1)..(457): unsure at all n locations
tntgaacctcatgataccattaatttcaggtattggtgttcttttggtccagatgattatagaaagggtggctctgtccgccctagcatgaactcttcaacaaagaggaaaacacctgctggtcgtcctcatacaaagaggggctgtatttgccattttattgtgaagcgtttgattgctgaaccatctgtcgctcttgtgatatataaccatgataagcatgtagataagatagggaagccctgccatggtcccatggacaatatggctattgggacgaaggccatgtttgcgccttacatatcagatgaacttcgtcttcagattatgtctttgctctgtgttggtattccagtggagaccataatgcagagacatacagaaatgatcgaatagcaaggaggaccatcataccgagatggtcttcttactcacagatatgttatgaggttggaag

SEQ ID NO: 77170 - DNA, 186 bp, Oryza sativa
aaaaaaagaaaagggggggggggaaaaaaaaaaaaagaaaaaaaaaaaaaaaaaagaaaaaaagaaaaaaaaaaaaaaaaaaaaaaaaaaaaaaagaaaaggaggagaaagaaaaagaaagagaaaaaaaaaaaaaaaagaacagaaaaaaaaaagagaagaaaaaaaggaaaaaaagagaaaaaa

SEQ ID NO: 77171 - DNA, 481 bp, Oryza sativa
  unsure (1)..(481): unsure at all n locations
tagacctatcccacaacaagctgagtggagcaataccatggcagttaactcgtttgtcatcactgtccgtgttctcagtgatgtacaacaacttatcaggatgtataccaaactctggtcagttcggctcatttgatatggatagctaccaaggaaacaacctcctacacccagcgtcagaagggagcgagtgtgctcccagttcaggtcattcgctaccggatgatggagatggaaagggaaatgatccaatcctttacgcggtcactgctgcctcgttcgtagtgacattttggattactttcgcattcacaagcttccgaatgtagagcttcagatattttaatacttactttgtcctattntaagcgcagccatgangttccgtgtctaactntaattgtcggtcttatttaanaaaaaatcatcgattaatatttatcgttattagatgatanaacatgaataatacttacttatg

SEQ ID NO: 77172 - DNA, 232 bp, Oryza sativa
  unsure (1)..(232): unsure at all n locations
aggagaaggggggaaagaaaaaangagaaaaaagaagaaaaagaaaaaaaatgagagagggagagaggaagagaagagagggattggaaaaataaaaagaaagaaaaagaaggataaaaaaaaggaaagaaaaagagagaaaaaaaaaaaagagaaaaaaagaagaaaaaaagaaaaaaaaaaggaagaaaaggaaaagagaaaaaaaaagaaaaaggaaaagaagaaagaa

SEQ ID NO: 77173 - DNA, 447 bp, Oryza sativa
  unsure (1)..(447): unsure at all n locations
ttggagaagatgtcttatgtggagtcctggcttatactctagttgagcgcctgtgaagatggagccgtatgcccgctagtccgctgctgtttatttttgattgccaggcctgaagcgcctttgtaataatgtaaatattatcgatataataaagatgtgccttttgtatcatgtatgtttggtgtaccccggcttttcctgggacggtgattaatacactagcgttcgggaaaaggcaattttcccggtcgcgacaagctggtatcagagccatctcgactgtaggataagccaagtggataaaacctaaggacatatnttataaataaaactatttgcgaaagttcctctttttctccttcccctaaagctatttgcagagggttactcccttcttcctttatcggatntcaactggtgctagatggtcacgtcagtgaagaagaa

SEQ ID NO: 77174 - DNA, 378 bp, Oryza sativa
aactaagctgaccaataatcttcctaaaggatgggtttttttgtaaatagttttactataggtacaaaatgtgaaatgatatgcacaagtttatcttttcctctctttattctctattttatttctttattgattcttctcaagtagactcgtgcatctccggaagcatcttgaattttaccatcgtcttccacagattaattcaaacctctttgtctcccagtgaatctaacggctaatattatcgggatgaggtgcctcatcctcattttattttgggttcacttttcattagtctaagatgcgtcagtcacgttacgttaacggctcgttcatatcaaaataaatgccgaaagaagtacatcaatatgccattca

SEQ ID NO: 77175 - DNA, 184 bp, Oryza sativa
  unsure (1)..(184): unsure at all n locations
actcagctgttgaacctagatctcatgacacgggagcgnttanntttatgctaattataagcagcgcggcttattatatataaaagaaataatttatagatatcttttctatgtacgtattatgctgtgatcgggaggtgaggttgtgaactcacttcccccgcacgcaaaacagatcgaccat

SEQ ID NO: 77176 - DNA, 463 bp, Oryza sativa
  unsure (1)..(463): unsure at all n locations
tctgccagtntccgtacctcagaatgtgtagttttcnatatgtgacangaanatatctagaggctccttcacatgcattaacttgagaacatcataatgccttacatggtacactgaccttatagtgttttcattgtatgggggcctctcatagtgtcctgcataagaagcaataagtttaaaatactctattcagagtttattggtgtttacttttgcagtttaggacgatttttcattacgcttccactttttaaacaatatgttctagatataaaagttgaaaaatattacaaggtatcccaagaaaatatgaataaacttgcctaagtgataatgttgctgcttatatattcctgatagtccaccaattcgaatgtttccatacttaacaacaccagcgaaccccaaaaagtagatgttgcgtgctgcccatcctccataatacctattagatgtttga

SEQ ID NO: 77177 - DNA, 419 bp, Oryza sativa
ttcttttctttcaaatccggacagtatctcagaaatctgagattgattaggaaaaagcggatatgaacaacatccatcatacagtattcccgtaggaaattattagcaggcatatggagacaataaacagtagagtacaatttagtgtttggttgcatgattgaaattggttacatgtcggcctgccactagccaggatgttagtagtagtactggggaccattgatttacaaacctgatagaagatgagatgataggagaggaccccaagtgtgcagtgcaaagttgaggagcccaattggagaaaagaaatgaaaagagagcataatgacagatctgtcatcacatctcataggttgtctcatgtgaatgtgattactactcactattattagtcatatgtatgaactgagatgaga

SEQ ID NO: 77178 - DNA, 340 bp, Oryza sativa
tgcactacttggacatagtaggccacatgctatattatagctatttacagactgctatagaaactacttaaaaactggatgtacaaagcttataggtataaaattcacatgaacaaaactacattaagtttatatgctcaaagcatctatgcatataactctcgcatcatcaattgtctctaggccaaaatgatatgctactaaatatctttcacattaagatatacaaattttatctatacaaagttcctataaacaaaaactaagtctacaccaacaaaatgtctattcgaatacttataaatacacatatgttgagacacaactaatcataaaggaa

SEQ ID NO: 77179 - DNA, 306 bp, Oryza sativa
  unsure (1)..(306): unsure at all n locations
ccacaactttcccaacaccagtcttttatgctgttgatgggcttcctctgattgtgagcataccacgatgtcgtcgatgaagaccacaacagacttatccaagtattccatgaacactttgttcattaagttcatgaagaacgtangagcattggtcaacccgaacgacatcaccgtgaattcatacagtccataacgcgtggtgaatgcggcctccggatatctcttcatgatacgcaattggcgatatccggagcgaagatcaatcttggagaataccgcggcatctttaagctgatcgaacag

SEQ ID NO: 77180 - DNA, 371 bp, Oryza sativa
  unsure (1)..(371): unsure at all n locations
tagactggaggaacaatccattagggttacctaaatggaatgatcgttcaaagngcgggngcagagatcgctgtcaggtggctacatcctttgctgaacaaacattatgaaggagatattttgtctgccccaatgtagacaacgatttcgttgtatgtctaaccatttacaaaatccgctatgatttgcacaanattactacccaaactgaataacattactatttttacagggcaatccaaggatgggtggaattactcgatggatcgacaatgtcactccatcatatcatggccagaagataacagagtcagaaacacaagtagagtatcaacgattgaagaccacgagaatgcaatgcattctgaccg

SEQ ID NO: 77181 - DNA, 446 bp, Oryza sativa
  unsure (1)..(446): unsure at all n locations
tctgattgtcnggagttgcttgaactgacgtgttgtttttatgtttctcggttatgggcacttgtcggcgaaatgaccccttccttgacaattgaagcaacagatatcttcccgaactcggcatattcttttctcattttgattcctctgtcctggcactggagttaggctgaaactgtaatcttggcgaggatatgcgttgccttgatgcttctctccgatggaactggcgggttggttggccatcttcttcgtcagcagagaactgaatcgacaatcttttggtacatgatcgagttcttcacaaaagagacaggtgatcctgctcgtttgacacctgtccggtggatggtcttcctcacaatgaacgcatgtagtggcacacgtagctgcaacatgaccgatttcttcacaacgagagcatgccatacgttccatcttattct

SEQ ID NO: 77182 - DNA, 473 bp, Oryza sativa
  unsure (1)..(473): unsure at all n locations
tncataaaagctagactaagcaataaaggaccgtttattntaccttctgcttctggctgtctcgcaataccttctacagcttgtcctgcagcagtaccttgaccaactccaggcccaatagaagcaagacctacggccaatccagcagcaataacggaagcagcagcaattagtggattcatgatgagttcctcgtgtcaaaaaaaagaaatggttaaggatacaatcaaccaagaaattcatatttctaagctctattggacagaagtaactaaaaagtacaaattgaaacgataatctgaattctccgaactgcttcgagatctcctttttagtttctaatcattagaggtttgtgtactcattattctatatctctttctttccaaccaactgatctttcattccatccttctttctttcctcttcgatatcctcgagtttctatttttttccctatcatctaagtcata

SEQ ID NO: 77183 - DNA, 433 bp, Oryza sativa
cttgaactgcttaagaatatttcggtgagctcttgtattcttgtacatgcaaaagaaggggaaacatacatgttttatttccttaatggccaattttcgcaaaaatctgcattcttgggatttgtctaattaataatgaaatttttgcagtccattgatgagagtattcatgttacaagcaatgcaaaggtagagttatttgatcttttcctcttcttgctttctagtactagaatcttcaagttagttctgtgagactgaacaagttctccccttctttactgcatgcatatttgacatgttcctacctagatttaacttgaaattctaatgtgactgactggctgaacaaatttcttgaatcaacactgtttctacaaatcgatttaattttttttcacattttcacaattcttttgaggaggattttgat

SEQ ID NO: 77184 - DNA, 465 bp, Oryza sativa
  unsure (1)..(465): unsure at all n locations
tgttggtaaaaatganaataaatagatacactacactggtctatgtcacctgtgacgggcccaaaccctcatctttaacggcttcgcgcatggtcagtgatcagtggtcactggtgagtccagtcacctttgacgggtggccggccgtcacaggtgacacccacctctgacgggcaagttactagatggccatcagaggtgttggtctccgctagcctacggcgagttgggacctgtcacaggtgactcatctctgacggccctttaaataaaggctgtcagaggtgatggtaggtcacaggtagttagaagctgtcacaggtaatctacctgtgatggccccaaaagtaaaggcccgtcatatgtaggtcacctctgacggacctttatttgctagttcgtcacaggtgatgttacctatgacggatatttgttctgacctgtcactgatgagttaattctaga

SEQ ID NO: 77185 - DNA, 79 bp, Oryza sativa
gcgacgatgacaagactccgactagggacggcgaggtggatgcggcgacttggcaccggctgtcggcgggacgcggtgc

SEQ ID NO: 77186 - DNA, 478 bp, Oryza sativa
gtgacacttagacactatgactgctgagacacggaatcacagcatgcatgaaatgtgatgctcttaaaacgcttaggagctcccaacggaaaatggagaaatcatttctaaggtacatttaatttcaagtttgaattactacatgtgtttcttactagctattatattgtactcatattgttattaaaaagatatcttaagggccatcatttgtttattgaaatggctttggtgtactttagaaattcttggctctgatgttgaactgaggtatgatttgcacgctatcgttatttcatactctagttcaaactaggggggtattttagtttctatgaacattttacgaggaaatgtgttagtttgtctatgtagtttgcccatgtcaacagcatagtgcatatggtctagactgtacaagtcaacattaactatggatatatgatgaaaagatttctcaaaaaatacaacaaatgtg

SEQ ID NO: 77187 - DNA, 480 bp, Oryza sativa
actcagcttagcatcaccctgtggtcgtggcgcgaggaggatcaatttggtgagatgatgcaacattggatgctgaccaacttctggacctctattctgagaaccgccttccaaatatccaacctgaattccccgttgttgacatggaaaacccttacgccgtttgcttcttgttgaacgagcgctaccacactgctgaccccaatgccacaacgtggatgatcaaggtgcacatgaagaagaaggttctactagattgtaccggatattccaacaaaggaagcccttctactgccagaaggatgtctgaggggctctccttcatctccagcgaaatgccatcttacctgtctagaagaaccatcaaaaggtaatttcatgtctggtttgcgaaatgcctgttcacctaccatctctttattatgcacaactgctactgttcttggtgatgcatgtctgcagaatcttactagtctgaac

SEQ ID NO: 77188 - DNA, 238 bp, Oryza sativa
gcatggcgatgcaacattaggccccatagggcgtaatatacgaggtcttcacgcagtctgaagtctattagttacgatctgatgagatcccgagtaacagttctaaaagctgagttacttgtagacggccgttgagtaaccacctgcaaatgcgaggtacccaatagggtcttgggacatgaatgttgggtcgcgttatgtactacatgtccatgtcttcgttctccaactaaaaagg

SEQ ID NO: 77189 - DNA, 351 bp, Oryza sativa
cctacacctactacctttagtgtatttatacgatggcgctcagtaagtcttagttacggtcggtgcctgtggcaatggcgtgccgctttcttgactccgctgccttacctacttctggatttggaatgtattccggaccgctcgttccgatgatttaagactatgcctgcaggcttatgatgtaataattcgtactagacgctcgtgtatgtgcacttggtatttcagctatgaattcgtgtgtactaaactacttgatccaaggaaatggtactggttacacgattgattcctgttataaaaatgggggtccacagagctagtatcagagccatacgactgtaggaaaag

SEQ ID NO: 77190 - DNA, 476 bp, Oryza sativa
  unsure (1)..(476): unsure at all n locations
tgtctgtagtacatcatccctctgactgtaatgaagtgcttcagctgtcaatgaatcaaactcctaaacacattactatctgaaagttgttctcaagagaataaaatgtaaaagctatgacagagaattgaggagaaaataccagttctcgtcaaagtttggcccctgtatgatgcccaaaggcgaagctcatcttccaactgctctgtctcacggagttcctcttcagtattgcaatccaccctttgaaggaaatgtttccattcatctacaaggaaaccgagaaacaaaaaatattttgatatccaggaggatttcaagggaattattgagtcatgtaaacctcgatattttgacatttcgagagaacctggatatgatttttgcaagtaaaaaagaatagaaaccccatcttcattctggtcttctaatgctggggaagagaanaggacatcttctttgtagtaaggagtcaa

SEQ ID NO: 77191 - DNA, 135 bp, Oryza sativa
  unsure (1)..(135): unsure at all n locations
cactaagaaactaagcntgagacccatatatgtcatgcactntatccattagcaatttgtttccagatggaaagaggctactaactccgttctataatagaagtcgcttcgactttatcttgcaacgtatgacca

SEQ ID NO: 77192 - DNA, 473 bp, Oryza sativa
  unsure (1)..(473): unsure at all n locations
actcaagctggaacatggcaccctcatattagaattcttttatttatgccccgctcgatatcccgttatggagatggatttttgttccacgtagaacaagaaacctcattagcacatgattaattaagtattaactattataaatttgaaaaatggatttatttgctttttttaaacaacttctatatagaaacttttttttaaaaaaatacaccatttaacaatttaaaaaacgtgctaatggaaaacgaggaaattcaagtttggggttgaagaatagaactaggcctaagaattgatgcaatgttattgggcctgcttcaatttagtttccattntattctacaaatattcatgtttaactccagtagaaaatgaatactttatggtacaccaattatctttccattaaataacacatgaccgcaatatataatatttgcatttaggttttttcaaagcgaaactattat

SEQ ID NO: 77193 - DNA, 458 bp, Oryza sativa
taaagctttctattacctcgtgttggcagtacccgctcctatatatctttattctcatgcactctacgcgtacacggtgtctagcagagagaggagttctggcgcacccgggaagggaagactcacacatgcattaagttatagatattgtctagaatctcacatggcagtcctaccaatgacgacaccactgtagacacccgcctcgtggttctaccaatggctgccccaccgtagagcccctgcctcacacatcaagaaaccactatgcatggatactgcctccgctcagctatctaatccgctaggtctatacccattcgagaagtaccgttgtacgagggtcgtttatgcttacttctggctcggccataattgccaaggacgcactatccttttcggacaccaccaattctcagccgcccagttcaaaagtgtttacattatttcttcacaat

SEQ ID NO: 77194 - DNA, 469 bp, Oryza sativa
  unsure (1)..(469): unsure at all n locations
ttgttcgggtatagtgtctaatcttggcccttttaatatgtgtgaacaatatactcctattaacattcagggtcatttgatctctagaagttcatactgcatttgtattatacgaactcatacttaacaatcgatttggattgctacgcacttataaaatccagattattgtctgaacttaaacagggaatgtatctgacttcagtgtgtagacatacccttgccatgtttctcaattcagtgtatgaacatgcccttgcaaggactgcttttccctgcgattatacttatgtaaatatatattgtaaaaacatgccttgcacatgcactactacttaaccaaaataacaacaaacatgttgtgttcatcttcagcagcagggcaagagagtcaaaattactggaaacattngccctatcatgttagagggacctcacgacgtagctttaatttcgaagccacacattc

SEQ ID NO: 77195 - DNA, 410 bp, Oryza sativa
  unsure (1)..(410): unsure at all n locations
agncttttgcctctaatgaccgaactatccgtattagccttttgcagcacatagatcagtttggggagtcattgacagctcaaactgttgatgagcaagtatgctatcatnttctgtatggacatctgcatgtgtttctggaatgttgatgcttgacaggataaatatctctaatgcaggttttcccccatgttgccactgagttctctgatacttctgcttttcttcgtgaactgaccttgaagtctatgcttgtattggcacccaaagtaagaccctcccaaccctctgcatgaatcaacatttgcaccccgaacaaaatccttgtggatgtctttcattattactgattgtgctgtgttaacagttttctttataaaaagtgttctaaatttatctatcgctctctc

SEQ ID NO: 77196 - DNA, 294 bp, Oryza sativa
ggacttaagcactgagctgcagcttaaaatgacgagtgaaagctatatatatttaataataaaaactctcctgaaagcagcagcagcaacaatagctgcttcttcttcttcttcttcttcctcctccagcacattacctcagaaaaaccacgatttccatgtccatttctcttcctctccacacgctcacgtacgcacaaaactgatcgatcgattaattgattggcacgttgtgatgatcgagtaaatgggggggggtggggaaggtggacagagaaattgcgataacgacaa

SEQ ID NO: 77197 - DNA, 397 bp, Oryza sativa
  unsure (1)..(397): unsure at all n locations
aacatacaaaaatccatatttaacttttaatgaaataaatcaattattaaccttgtaattntgggtatttttaaaacaagacctaaactaataatataatgtagagcaatcgatgaactcgtcggtatattataaaaagaagcaatatcaatgataaatcgttaaactaggacatatatagtagattatctcttggaataaaagattgagaatcatacgaaatttgtttggaacaatatattcaatgagattttggagaaaagttaatatgaggttgaatctctccgaagattttcttggactcactcactcactctcattcaattcttggatttttctgtagcctatccaaaatattattactggattttttagtgtgtggttgcataatatccta

SEQ ID NO: 77198 - DNA, 346 bp, Oryza sativa
  unsure (1)..(346): unsure at all n locations
ctgcagcttaacgcttgacaagctgtaggggaggaatatctttttcatgtacatagcccatgagctttccctggtatctagntattttatttcctctaattttttttactcgttacatgcaattgcgcctgtcaataaagatgaataaaagactcaacattaataaaagacccaccagttaagatcatttgctttcactgtcatgtctttgaagcaacctatgtacaagaacaagtgtgaggtgatattgcattcacaatatacacccgcataccaacatcacccatgtttgtgctacaacatgatgcttgcacattcacgagacgagacgtagcatccatgacac

SEQ ID NO: 77199 - DNA, 442 bp, Oryza sativa
  unsure (1)..(442): unsure at all n locations
ntaagtggagtagcgctggtgagaagccgnnagatttgttggatggatggaagaacgatgagatatgatgaatgataccaccgtttngtaacttaatattatattataaatgggggtggaaagatgtagtaatttaaatgtcaaatcttaagaagaagaggaatgaaggatgagctttgntagtagatagattatggttagcggtttagaagtcataatangtagcatggctgttgaaaatgatgatgattcaagtgtaccagtccatgattttaaacattgtctttctagtcttctattcagngttaaggatggctatcaactagttaccttctcatgttgtggttctactatctgggtacatgcaatgtttcttttaagcatgcattattggggtgtggtcagtatatcttaatagctgcgtgaggcttactttggaacg

SEQ ID NO: 77200 - DNA, 396 bp, Oryza sativa
agcttagctaaaagaaataaagaatagctaaataaagtgcatgcacaataaattttgataaattcttgatctatatttatagtatcgtatcatatactaagatagtttattttaaatgaaaggattagagatagctttcgaaacataagtatatgttggtatgtccacggtttctttttcctcgattcaaagactcagcaacaacgatgcggcaacaacttaactgcttcacggcagtacacaccttggtatcgatcgtagcagccttaattggccaactcctttaatttgctccctctccatatagcaacagcgtcagatcacaatatatccacaaaagcttataatagtgctggctaacttctctctctctcaatgctagctaaaccatagcta

SEQ ID NO: 77201 - DNA, 321 bp, Oryza sativa
gctcaggattcctgaagttcattagagttacttttgttagattacagcagtcggattttcatattgacattcttgcttggaaaggaacctgatttatcatagctactgattatactgcaagtccaattctgcaatatgcattatgtgaagttctattcaggcattgaactatataaggttctgtattaaacgaattaatggaaggttatgtttgatggtaattcatggattcttatatggcctgtacgcataaacgtacaatatgtgtgtttgttagcagctgagcatttcttactttctgtaggctctaataacacttac

SEQ ID NO: 77202 - DNA, 339 bp, Oryza sativa
  unsure (1)..(339): unsure at all n locations
agctttgccgacaatggtgcgtgcggcggcatggnttccgcatatgccagaatgtatgtctttcaacagttgtctccctttctctagagatacacagcgctgtaaaaatcctgaagggcttttcttgtatagctcggcttcatgaataatataaagcctgctaccccttgaaatccgcttggctttatctttatcttgagggagctcttgggaagttaaaaatcgtatgaggggctctctccagtcggcttcaatcatggctatgtcttgagtgtccgcaacttgagtcgtttctttctgaggtacagtcggctcataaaggtgttcgacgaatacatc

SEQ ID NO: 77203 - DNA, 263 bp, Oryza sativa
actctgatctgagtgtgtcaactgttcccacaagacacagacccacgacacgttcccgtgcgccgacatgccatctcgacataccggaaagaggccgtgacaggacaccttcgataaccccctctaaccgatcgcaccacacctttaggttcgcccccgtccccagcaggcaacgggcagccccctttcatgccgcggtgaattcggaagccgatcaaccggacacccctggcgacccaacttcattacgctcaccctcgcct

SEQ ID NO: 77204 - DNA, 385 bp, Oryza sativa
  unsure (1)..(385): unsure at all n locations
atcaaggggagttgtctcggagatgacctgaacccaatcttttccacaaaatagntcctntagctttctagatcgcgtggtgctatgcttgtgtcgaagggtatgggttgcgtcataggtggggatgcgaccatactacgttgtttgcttaagcaacttgaaaaataaaaggctacgtcacaacatatcagtatgcaagtggttttgtatcttatctttagcaacccctctcttgcacctctcttacgacctggcagcggatggtcaatgtcagagataagatcaattaaagtcacctatcaatgggtcagtngaaagctacaaggtataccaatgcccgaagaaccctgcttgtgatcaacatttggctgtcagattagatgat

SEQ ID NO: 77205 - DNA, 417 bp, Oryza sativa
ttactggtccaaaacattatcattagttcattaacaatatacatgttagcaagtattgagtacatttcaaggagggaaaaacaaggctaaagcactcaagtcaatccacttgttggtggcataggaaatatggtgtgaacgaaacaagagggtgttccaaaatcaaaagaaaaccatgtcgcaactactcatcaaaatacaagacgaaatcaaaatatggagcatgtgtggagcaaaaaacatcgcgagaatatccgcttagggttcatttagcgcgtgtttcttttatgttttcttccctagattcccttgtttctttctccttcaccttctttggggatatttgaaatacttttctattctccttaatataactccagcttagcctagcttcgggttcaaaaaaaaagtattgag

SEQ ID NO: 77206 - DNA, 450 bp, Oryza sativa
  unsure (1)..(450): unsure at all n locations
acacataaaactcaagctggtntcaaaactctnggaatatggcttatccttggggtttagatggttgngttgccaccttctttcttgcatttttattgtgaaatttaattatgttgtgactaattacagggagctttacagcaacaacataagtgggacaatacctaatgaactgggaaacttaactaacttggtcagtttggatctttacctgaacaacttcactggttttattccggaaaccttggggcaactctacaagctgcgtttcctgtaagtgtactccactctttttttattatgaatagaattataaattgtgtatatcattgaaggccttcctgtttgaatgatcataacataattctttatttgcatgtcttcttgtaaggatagtcgtcttaacaacaacagtctttctggttcaattccaaaatccttgaccaatat

SEQ ID NO: 77207 - DNA, 346 bp, Oryza sativa
agcttacataaattgatgcctgtgatttatgataaattaaaattaaatagcgtatagaatgatgatttaaatgataaattaaatctcaatagtgtatagaatgatgatttaaatgtaaaagtaaaggtgatatggctttatgagagaagaaaaggagagagatattttggaccatagattatctaagactaaaaataattgatgtgatatggcttaatgagagacgagagaaataacattaactaagtgagaatgaactatatatagaatattataaaaaaggatgaagagataaattgaaataatattttgattatgtgggatgatgatttaacatgcttacatt

SEQ ID NO: 77208 - DNA, 435 bp, Oryza sativa
tcgaggtgaacgatcgatgagtaccaaaatttacacagcttatcttttgaccaaactttagctcaaaattggtgaaatgcatgaatacacgaaaggacaagtgggtgatattgaagacggtgtcacgtccaaattaaaatgctgaatgcggacgaatatatatagagcctaaatatatcctaatcccttcacagaaattaagaaagtaagtgaaattaaatggtgcaacatttgtgactgtttgagaaagaaaatagatagagaaattaaatagaaaatagttgtaattgcttaagatgaggggtagatggagaatagctatatattaaaataaaattgaactaaaaatatatatattttgagacgaaagaaatagcatatatcataactaatttaaaagtttcataacgtactctctgaatgaacctccaccaa

SEQ ID NO: 77209 - DNA, 373 bp, Oryza sativa
agcttaacttggcgtctacccggttatttgtactgtccgtttctattttttaaaagaacttttgtcactttgtcgtgggttatgttcaagaaattggaatggtgtgtaatataaactgatcgcgcgtcctttttgaaaacttctctttgatggtaacatgtcaagcgcttgaagaatttctaaaagcgtttgaagccaaccattccttaagggcttgttcactttgttaccattttcaatcttatcattctctttgtacagttaacaacattgctacctttagtttgttgctaaatcttagtaagcacatatgaaatcttgctaaaattgataatcttaccaatgttgataaccttaccacaatttacaatgc

SEQ ID NO: 77210 - DNA, 397 bp, Oryza sativa
taacgggccggccggcccaagaaggcggcccaagtgcgctctcgctttatggaaggagagagataaggccggtggaccgggctcaccgtgcgcggtcccgggtgggacccgcttatcagcggctcggctcaccgtgtggagggagcacgctgcgcggcgctagggtggggaagggacgcggtgcacgcccgcggttcgcggtggacgcggatgcggcgggcccacgcgcaaactcaccgctcgcggtggaacgcgcgcacggtgagggactgaccggggtcggctcgacccggtctaggctgagctggcgccgacgtggcgcctacgtggctgccacgcgggccgtggggaggtagacgacgacgccggccggaacggtggtcacagccgctagcga

SEQ ID NO: 77211 - DNA, 387 bp, Oryza sativa
tagcttgaatgacaatatatatatttaaaatgatagactttatggtgcaagccaaggtgatcattgatagacatatgtatctcagtggccactatcgttttggaactgaaaagtgcggcgctgttcttaagcctcagcgtgaatgaaggataattacccaagttaatcacccgaataattaatgaccctcaatgttcttgcttttttttacgtttttcacatgagacatgttcttcatccccaattccccatcaccctagtattatcagagccattagcaaattaattggattggaatcgtaatctaaacatggtgtacacgggaacagcgtcgtgcgccgttcagcccgtggaaaagaaaaatctcactctttttccatgaaaaat

SEQ ID NO: 77212 - DNA, 457 bp, Oryza sativa
ctattacggacctataaaactcaagctgggacaagcttcgaccgcaggaggaggggatgtcactgttgcagcatctgtagcagggagttcaaagcagaagccagtggcccagcctgtgaatcggcctataagggagaagcagcccaactcccgtttccctgcaagtgtgtggacccagtagtaattggctaggcaactgtcagtgagtgagagagactgtgtagttcgatgctatataagccggcacgattgagaggaaggggatcaaatcatgtaatcaaacaaactcaaattcaattccatctctgtcctgttcaattctgttatgatcttctccttcttcttcttcctcaagccatctctctcaatctctttccttctctactcgaccgaatctctcctacgaattcgagaccgtgacagaaactcggcgaagcccttacctggcgcgccaact

SEQ ID NO: 77213 - DNA, 276 bp, Oryza sativa
  unsure (1)..(276): unsure at all n locations
agcttgcgggagctatagtggtcggctgcttatatggaaggcatgctcacgtanaggacgacgagactaacccaacggtactcaccctcgaaccaaacgacgaacgactactgtcggcgaccaaatgggtggcggcggcggcttctgtcgacgggggctacagggctccggtgaccggtgacagcggtgagagagcggtcgaactttaccttgcttctgcgaacacaacggtggtgacagcgaccggcggcgacaaccgatgcggcggcgcggcgc

SEQ ID NO: 77214 - DNA, 418 bp, Oryza sativa
  unsure (1)..(418): unsure at all n locations
tggccgtgcatcggagcgcatagttgagaatgatgcaccttccatacaaacacaagccactgagggggaagtcttatcaccaaactcatcacaactatatgagatcgatcgctcctagaccaacgtttgaatatatctatatttgtgtttagattgaattgagttggaccttcaatttaaatccaaatggaaattgaatttatctttattttagtgtttgtgttgggttgactgagaataggtagtaacttggattaagggtgggggtaggggtgggaaaaaaatataaaaaaccggacaccgagccgaaccgagccgaagtagcagttttttctattgttggttttttcttccgctntaatttctccgcttgttccatggttgggttttcgttggattgctattcttaaaaccaacg

SEQ ID NO: 77215 - DNA, 393 bp, Oryza sativa
  unsure (1)..(393): unsure at all n locations
agcttaatggcttagcttttatttcttgaatgacgatctgagctgaatacgttgaccctggtgctgagagcaaaggcaattttcacctttggtattctatctaaacaatgtaggataccagtataagagggttaatcttgcagatgtttttatttctaacagttcatttctgaactatcgaatgtatttgcagtcacttatttagtttcatgaactgaaaattcttccattgatgtttgcctcangtgcatctgcgtaaggtcatgcacagaagtcgttacatgcggaagagttccatcattcccgcaatcacgaaccgaatcaagagagatctgatccacaatcctctgcacctaatattttcagtagattttcttggagtgacaaatcaac

SEQ ID NO: 77216 - DNA, 428 bp, Oryza sativa
gtgaaagccaaaacattaccttgggccgcaattttgcgatgttttgaacaggctgagaaggctgctgaagaaatgccttgttggaagattagcataagctccactgctgtgctttcatgttgaagtccctgtctgatggtgttccaaatttctgaggacaattcttgcaaagactttggcttcgatagaagcggtcgtggctgctgctgctgcgcgcaagactcgagctgcccctgctttctgcaggagacccgcatggtgcactgcgtgccgacctccagggattgtgaactgcattatgttgggagtattctcattagatctataagtatgttttgctggatggtaaaatcattttgcatcaaatagaagagcagatggaagtcctcttgtgtgaatgtctgagtattttgtgtgcgcacgtgtgt

SEQ ID NO: 77217 - DNA, 313 bp, Oryza sativa
ttgatacatatacaattctaagattacttctttcatggccggtgctactcaacctcatggtatggtgctaccggaccctgcacaaagccatgttatctcactcatggagatatctcatacgcttgctgatcaaggctttaagattgacttcgtaaacactgagtgtaaccacgaccgtgttctctaagccttggcagaaaaaggagcaatccctggtggaattcgcatgctctccattccacatggattgcaccctgctgatgaccacacagacatcggcaagttggtttaagtcttaccaaacgctttgctc

SEQ ID NO: 77218 - DNA, 438 bp, Oryza sativa
acagactcagcttactttcacttagtttttgtcgataatacttttctggggtttatttagacagggtagcaacatacagttaagctgctcgtccaaaaaatggcagtacttgcatacaactatactcaatcatagacgtacagcgaatggtggtcaacctttgtttttcaccttttaatagatcagagattatgtttgatacgagaagacattgaataaaaaccatatgatttggttgtatttctggttaaagcatcagatcgagaaaataataaaaagattattgcagcacaagttaatggagacccactaattagctggtcaagcatagaaatacctggccggagcgaatgggcagccactacatgatccgcagctgcagctctcccaacaggtggaggatattgcacaattgaactggacaaggctcccacgtct

SEQ ID NO: 77219 - DNA, 399 bp, Oryza sativa
agcttggcaagttaatgcaccatcgcttcctagaaagtatttcattgaataaggcttgagttgtattatatggtgctaataataatttggaactttcacatcaatgaagtccagcttttgaactgatcaaaaggtaattttatcggttttacccatatcaatcgtacaatttagcatgatagttagttatatgtggtggtttatgttacagggctttgcacatgaacagagggctccttgattgctaacttggagatatctagtaagtttgctcagattttgaaaaggaaatattcgtcagttaatgatataaatcaaaagatccttatggtgactttattattatataggatcctgtattcatgaaaaacatggtactatattatattatatatacca

SEQ ID NO: 77220 - DNA, 433 bp, Oryza sativa
  unsure (1)..(433): unsure at all n locations
tgtagcttccctctntctcnacgaccctactctgagtgagaaagaaattatacagggacaaaccatcgcgacttatgagtatngaaggcgtcaggagagcaagcccttgaaaaccaatcaattggagctatcctgtgcagatttttgcatgcatcttgatgagccatctcaaagaagaagtgcagtttggcgtgctaatcttgttcatcttgatccacggagctagcctaacaacggtggtcttggcaggattagccttcgccgagttggtcgtctcacagttgatctcggcagcctagcagtgtccttcaaccacgctcggacgcaagcacggtaagcagaaaggcgaggctgcgcgggcgttcgttcccgccataaagcttctctccatggtttctggcttgctggctcttcgtccctctcgtgtgttctt

SEQ ID NO: 77221 - DNA, 407 bp, Oryza sativa
agcttcagcaggacatcaaaacaacaaaagcatcaaatagtaactgctatatgtacagaatttcagatgcagaaaaacagtgaggctgttgatttttgcagaggaagagggtattcttattcttcagggttcaaaatagcagcagcacaatgcacaagcatcttttctctgtatacattgcacttcaatcccattgtgctctgtgactctgtcctcaactccacactgcaaaaagggctttggtgcactggcacatccatgcaagaattattaggcttcttggttattttttatttggacagacagctgaattctgtttgtgaggagcctcataaaaaaaataccacttcaatttggaaagctttatgaggagattaattaattaactaaaattgctatggatgaca

SEQ ID NO: 77222 - DNA, 410 bp, Oryza sativa
  unsure (1)..(410): unsure at all n locations
tctttcctttgaagatgtttataggtcatctccctgcctcctcttgatgttacatatttgcaccgggggcaccctgataattattgaacttaagaggaccacaacacttctatttggagtccaagttcatttcaatttctgctgcaaggtcggtcttttttggtgaagaactccatttgggcaattagatgtgaataaaaatattaagagcaattaaaaccgtntcattccattataattcaattatgtcaggtaaactctaataaggttattgttcagtaagcatttgactggcctgcaatgcctgaacacctcgaggtattatttgcttttcatgctccttntaactggggtcttttctgaggaaacacagtanaaagtaatgctcatcattctgagaacattaaact

SEQ ID NO: 77223 - DNA, 350 bp, Oryza sativa
gcttggacttctctacatgcacaagctgtcgattgtgctggatagtagctttaatatctttgcgttcccggtgatcggctaatctctgcctagccttctctatcttgaatcggtgttgctcaaggcaaacggctggagtaagggcatctgctatttcatctgggagtaaagcttggatgtctgttaaccttgcccggatcgaaccacagttggtcaccaagttgtctagtgatgcttctagccgatgagaaatatcttccagtgtttttctcacatcatccgataggggagctaaagctttgcttgaaagatcttcttttgcttcatcaaggaaactctgatgtcaaaag

SEQ ID NO: 77224 - DNA, 356 bp, Oryza sativa
  unsure (1)..(356): unsure at all n locations
tgagaaaagtgtangcgacgacccgtgtataccttctttgagcgcccggcccatggatccgtaagtcctgcaatggcgctgctgaggatactggaatgtcaggccaaacagcgcctatagatactgcgggaccattatcactcctccacctgagtgatggttttatagaaccggccgactgatgtaccgcctgcattttctgctactgcgactaattcacctgcggtcgcacaacatgattcaagatatgacgctacattcgagcagaagatgaccttacagggttaccaaacgagaccgcggttggtatgactgtagaacctgcctgcgaatgagccttgtgttcatcccacatc

SEQ ID NO: 77225 - DNA, 410 bp, Oryza sativa
agcttggacttctctacatgcacaagctgccgattgtgctggattgtagctttaatatctttgcgttcccggtgatcggctaatctctgcctagccttctctaacttgaatcggtgttgctcaaggcaaaccgctggagtaagggcatcggctagttcatctgggagtagagcttggatgtctgtaaaccttgcccggatcgagccacagttggtcaccaagttgtctagtgatgcttctagccgatgagaaatatcttccagtgtttttctcacatcatcggataggggagctaaggctttgcttgaagtatcctcttttgcttcatcaaggtaatctctgatgtcaaaagagaagagatcggctaaaacctgcagataccattccggaaagagtaagagctgagtaaa

SEQ ID NO: 77226 - DNA, 423 bp, Oryza sativa
  unsure (1)..(423): unsure at all n locations
ntggagaagaagtcttacgtggagtcctggcttataccttatttgatcgcccgcgaagatggagccgtaggcccgctagtccgctgctggttatttttgattgtcaggccttaagtgcctttgtaataatgtaaatattatcgatatcataaagatgtgtcttttatatcatgtttgtgtgatgtaccccggcttgtcctgggacggggactaatacacttacgatcgggaaaatgtatatttctcggtcgcgacaataaacgagtgggaagctctagagtcgaacaaaatggtatcaaggatggaatgaatgaggaacgtaccaacgatgacgcctggagtcgtctacacatcctccgcagtcacgtgggttacacggtcccgaatgacatcctcaccaccggtcgtggggcggggaggcgc

SEQ ID NO: 77227 - DNA, 389 bp, Oryza sativa
gcttcttcttgaagccatccgccaatcattcaagtctacattgaggtcactgggaagcggaaagccaacattcacctagctcctgagcaatctccaaatcctgtttgtgaaagcacattgaacaaaaaggttgggtgtcatcttgaaatgtcaagttgcatagggaacaattcgcctgatgaggccacctcttttctgtagattgtcagccatgaggcatctgccctttagcgcaagccacatgaaaatctttactctggacagcaacagggattgccaaagcagcttgccacagctccatatcattttcataaggaagaaaacatggaaaactttagacatcgtagtttacgtctgttgttttagagccattagacaatcagaatatg

SEQ ID NO: 77228 - DNA, 426 bp, Oryza sativa
  unsure (1)..(426): unsure at all n locations
tttctatggctgatgacaatgttcagcagaggaaatnttgtgctcccaaggagaaaagtatagtacaaagaaatgagtggtttggtgttctccttagaattaagaataatgctatcattgttttggctatcatttgtcttcagctgccatttgagttggcctatgctcatctatatgcgattacaaaaactgaggcgctaaggtaagattgtaggaatatcactatgatctattcatgattcttgagttatcaacgatgtgcaattgacctgaagcttattttctcctaattgttttatatctattccttatgttttattttgttggttatgggtaccactaaaatatgaagcatcagttcttattgctgatgtttatgcaggtatgtgttaactgcagtgtatcttgctgcaattcagtattaca

SEQ ID NO: 77229 - DNA, 393 bp, Oryza sativa
  unsure (1)..(393): unsure at all n locations
agcttgtaatatgttattctggcaagatctatgtatgttctctcaacagttggcttcagatagctattacaccgcggattgaagaaatcacccttcttctgcctacaaaatatgagggaaggtacagttttccactctcacttctatgtaataggagtggaagctcaattcagtatattcacctcatgtattgtaacttacgtcctacggttggccttggttgcttcacaaatctgacaaagctgtttttatggtttctgtgtattacggatgacgagttaatatatcttctttccaagtcttttgctttggaggagttggatctcagatattgcagtgagataatttgcctgacaatccatgcctactaaaaaagtcngtgcctactgattt

SEQ ID NO: 77230 - DNA, 428 bp, Oryza sativa
  unsure (1)..(428): unsure at all n locations
tatgagttatgacgtaagagcctncgctgctttgagaagctggagccctctattgttagggatgtgaccttagcatgttgcaggagcttctgtaccttgggttattttgagtagtcatggctatccttgaaacatattaaattagattactatcctctggttgatttgagataggtttgaattagggcatgtatacaacagcaactaatagcaggctcttagcattnnnaacaaggtaaagtttgctgacatggatgagaggggaaaggagggtgaaacatcgttgttaagcttaacaacggcttaacatcnactcttagcgtttataaaaggaaactttgttgcatgaggatgnannaaacaaaagaaaagatagatcacataggaactgttttggtgcattaatgtcacaaccttttgtctcttat

SEQ ID NO: 77231 - DNA, 425 bp, Oryza sativa
  unsure (1)..(425): unsure at all n locations
cagcttggagatctcccgacgtggctgattctcacgggctgggtgatccgggttagtaatgtcgcgtggataaagtgtaccccctctgcagaggttaacaaactgttcgaacagccgtgcccacggtcatgggcggatgtgaggggattcctagcgtagttttgttgactactgcttgtgaaattgctgttgtgaaaaggggttcgatgtttgaaaaatctgcagctgatgggatcagctaagcccgggtggccgtttgaaaagttgttggcccgggtggccgtttgaaaagctgttggccgggtgccaaccttgtttcaatcctaaagactgatacattgcacaaactccgaccggacgagacgcacttgtttatncgagtcgtttgaaagcactcacttagttgttttagaaaagagttcaat

SEQ ID NO: 77232 - DNA, 348 bp, Oryza sativa
  unsure (1)..(348): unsure at all n locations
tagctcatagctctttccgggtgggggcttctctgatctgatcatgtggatatgcagtgcggccatcgacgtcnagggggtcgccggagttggaggaggaggagaactcgccgatcgagcaagtggcgctgacggtgccggtgagcgacgagccggagacgccggtgctgacgttcaagatgtgggtgctggggacggcgtcntgcgccgtgctctcctttctcaaccagttcttctggtaccgcaaggagccgctcaccatcaccgccatctcggcgcagatcgccgtcgtgccgctcggccgcctcatggcggcggcgctgtctgagcgcgccttcttccgtgggc

SEQ ID NO: 77233 - DNA, 410 bp, Oryza sativa
  unsure (1)..(410): unsure at all n locations
agcctgacagcaatcagctgcactttctatatgatgtgntaagccccatcgaacagcagcaccaccgctatcggtatgtacttgagcattgcattctgggggtaaaggcggacctgctattatctctttttctgcaacatacatgttaaaagctatcagtccaaatcttctcacagcattttaaactcaaggaaaaccaataccaatatgtcacaagatatgtacaaaaaaatagcagctacacaaatggtgtaaaggaaataaccttctggttcattctcaggcttgtcatcatgttcaagatgccatacactaacaggtatccaaaggccaatgtcgtccattagcattcgccaatttaactccaatgctccgtttaacatccctaagtatttgaccatacaacatta

SEQ ID NO: 77234 - DNA, 348 bp, Oryza sativa
  unsure (1)..(348): unsure at all n locations
taagcattctgctaacatttaaaattcttttcggcacttgtaaacatcaaggcataaatcagtaaaatctgttgttctaaagatgcaatgttccttgatattcagtttctttgcagntgcctcttcttccggtggcgccaaatgtatcgctcccagcatattctctgcttctccagccttctgcttgacgggctttcaaaaacacatgtataattacgaaaagttcaaaaatttatgtatattttcaatatttattcgaggcgtatgacattactgctgtttacaaaaatgaaagtcaagtcatttgttgggtcatagctacccattgagaaggaataagttcatctg

SEQ ID NO: 77235 - DNA, 352 bp, Oryza sativa
  unsure (1)..(352): unsure at all n locations
agctttagntgcgtagccagctatagtcactactcagctaatactgaaagggtccaaacatagaagagttagtgatgtgcacataaatctcaagatacattcaaaaaacgctcatgctatgtgaagatcacgtatatgtgatattctctttccacctcacttccgtcttttacgatttgagttggtgacgtgcacataaatctcaagatacattccaacgacgctagtgctatgtgaaaggccacgtatatgtgatattctctttccacctcattttcggcttttgcatattgcaaactctatcaatagcatccttggagcctccgatgcacatctctactttaattttttt

SEQ ID NO: 77236 - DNA, 426 bp, Oryza sativa
  unsure (1)..(426): unsure at all n locations
ttgcttgacctatggaatntaattcttcggacggaggttacgtgcactctctgaaagttggattntatatgcccatggttgggggtaatgtgccactgattttatttgttgcttcaggagatatgggattcccgtgcttcagaagagcaggatatgtatctgaatttcaatctagtgctaagtgatgtatctgcatttttagtggatggtgattaccattggaatgaaagatccaatgaagtaaatttattgtcagttatcgacaagtgtggaattgctttaaagcttcagcaggtaaacgactagtgttcatttactcaaaacagttaatatgataacagtacatataatcaacaggacattaataaatttttattccttttgtcagatccagttagaaagtgcactatacccttctacaagaat

SEQ ID NO: 77237 - DNA, 386 bp, Oryza sativa
cccttcaaagtaggtcatgtataatcattaacaaaaagaagaggtggaattaagcttaatatgcttgttacagaacagtgcaaattagtgttaccagactttatgtagtaagcaaaccagggtaatgtatcacgcatatactcataaaatgaaaggacaattaaatatcaccgaaggacccacaatatgcagaacactaatgatcaaataaaagtatatgatgtgatgttaaaggataaatccatataattgcatacctattacctaggcagaatgagccattaggtcttagtatagacccatcaagagaaacagcaccatcatttatcaaaggaatagcatttcgcaattcagctctagtcttatagacttgcaactgagaaaac

SEQ ID NO: 77238 - DNA, 439 bp, Oryza sativa
acactacgcctgaccattcgttccaaacctagagctattgttacatacttttccatgtttcaagaatgatacactatgtttcttatcaagtttgataactgtaattgcttcatgttattcttcaatgaagcgaagcgaatcaacaatggtgcaaataccatcaccgatccaaaaccatttcttgagtcaccaattaatgaaatggagtagtcctaaattgtcctgcgattaaatactagtctaatataatgagacaagcaaagcgttatccaactgctgtaactatacaagctagctagtactgtccatggcgtcataatccaccacttaatccacgctttagaagcaccacaccatttgagacacacatgaaagcagagctatgcattgctcttaatgtaaatgagtcacgcaacaatagcacttcataagggtcatc

SEQ ID NO: 77239 - DNA, 428 bp, Oryza sativa
  unsure (1)..(428): unsure at all n locations
agctggaagtgtgtgttgaagtgagtgaagtgaggtccttatttatattgtgagaaggggaaatgtctgaattgccccgcaaccgtcatcagggagtgatctggagcgtccatgccaaaacctggatccaacggcgctcaccagggttcggccgaacctgggctaggcccccctggcctggcctttggcctggctcctctcttgatcctcctctacccattcctcggagttttgggctgattttccgatattttgatgaagttcacaacccatccttgtatggatacgtaattctcctcactttagtctagatttcctcccaaccttggggtttatctcctgcatacaaatatacaccaaacttgtggaatttgtgagattaagcacctatcactatngtgggtggtttgttatcttaactttatgca

SEQ ID NO: 77240 - DNA, 443 bp, Oryza sativa
  unsure (1)..(443): unsure at all n locations
ntgaccaaacaactcgcacaaaaagcaactttgtatatttttcagaacgttctttgtcaaaatcaactcatcaacaacacaagcatgtaaaacaaatccaagagcaaaagaagagtccaactttttagatttttcaatctcaaattccaatttcttgcaattaacataattgacatctcgcaaagcattaatttcagaaaataaaacttcacaatattgacaattatcatcattaggaatcaaagatttcaatgtagcaatttcagcatttagaatctcaatagtatgatccttctcatcaagcgcaacagaacatgtttgaagtttcttagcaaatttataagcagcatattctaattgatcataactaagcttttctttattatcatcatcagattcatcaacatcagaacttgcattacgagcaataaaagctagatcaa

SEQ ID NO: 77241 - DNA, 376 bp, Oryza sativa
agcttctcgtgatcgatcatcatcccactctagcaaaggagtacgttgttggtagtacaggcgagccctacgccccccacgccttaaccggtgccagtgttagccagcgatgcacgcctgatcccttgtaacagccttcccaccagaaccgcgtaaccagcccattcgacgggcgggcccatttacacataccacattaccactccacatagtgtgaaagctttcatgtgtaaataaagaagagtggctagctgtgatgtcctacgatccttttgttccaaccaaattatatcttctgtgcatagaacttctcttttatccaacacaggttcgtaactgcatcactgtcgggtttcgaaccaatgggatggaaatg

SEQ ID NO: 77242 - DNA, 437 bp, Oryza sativa
tcacttgtccacgcatccgctttcgcgaaggccctgcctcgtcgtcgaccttttggggattcgcccggggaggcagttcgccattgtaaacccggttcgcccgcccagtcgcttgacgtgttaacagctgactatactcgacgaccgaaacatcgccgatcatcctgcgggcttcgtcttcggcctggtcgagggtcaacactgtaaaagtagcgcgtgaagctacgtcaaaagacaaataaggcgaaataacaaagcacagcagtatatagcaaaagaagtcttactgttcgccccctcagggagtatcaggttcggcaaaccgtcgacttcttcgccttgctcaaccgcgacttgccatgactgggagaggggaaaaatgcgaagcatacaaaattcctccaccaagtcacggtagctaaggcaggagcaaacct

SEQ ID NO: 77243 - DNA, 337 bp, Oryza sativa
agcttgagttcatcaagatcttggaggccatctatgttagaaaccacggcatcccttggtctctcattcatgatcataatgttatccaatgctctgctctttagcctcattgctaactcggtgaaccataactttgtaggcgaacttcaacgacaagttcgacgagggcaagaagaagtggggaagcggcgtcatgggctccaagtcgcaggcgaagaccaaaggcagggaaaagcttctcgcttaggaggccgcccagcggatgacctaaattatattcgccccccgccgttgagcctcgcctgtagcttcatttttcagtgtaatgattttgacg

SEQ ID NO: 77244 - DNA, 430 bp, Oryza sativa
  unsure (1)..(430): unsure at all n locations
tcatgaaacatacagcaacatatcanggagttnttcgccttggatgttgctcagatcaaacattactccatggttaagagaattggagactgtatatatccccagctcctgtagtatgagagctttcatgttgtcttgtaaacctgtttgtgtgtttctttaggcgtctgtactctntatggtgatggtactgtttgtgtgttcttaaaaagaacctgaacttggcattagttgatggtcccatgtggtgatggtactgtttgtgtgttcttaaagagaacctgaatttgggattggttgatggtcccttgtggtgatggtactgtttgtgtgttctcaaagagaacctgaatttgggattaattgatggtccgtttcctgagctaatatttgtgcttgttctatgcaccgntggatgttttgaagattt

SEQ ID NO: 77245 - DNA, 338 bp, Oryza sativa
  unsure (1)..(338): unsure at all n locations
agctttatgcttgttccatcagttgcaatcttaatgactaaaccctgatactataagcattacaaatattctttcggcttgcatccatctgagctcagngcaacttgtgaaacaatgccatggttacatgcttagagcatccctagaagatattcatctagaaggagcacttcttgatgcatactctaagtgtgggaacatagccaatgcatacaacctctttcaagttagcctgcataaggaccttgtcatattcacagccatgataagagcttatgcaatgcatggaatggcagaaaaggcggtagaactattctccaaaatgcttacacttgaca

SEQ ID NO: 77246 - DNA, 363 bp, Oryza sativa
atcatggcatcgagggagaaatgcatgtcttatcttcacactgatcactgtgcgaactagacactaccaaaaaccggactagctctgacgggcattggttttactaacgcgcacaaactctcttatcggggaaagtcaattttgcatgacacacttatatatctcaagggcagaaaaggaagttccttgatgtagatatatacaccacccgtcacaataaattgattattctaacatggacaaggctgactgtggaaataatggattcacggtgggagttggcgcacagctaattttggtttgaaccaaatggtgggagtggcgaacaattggtcacttcaccacacacgccatttcgctgac

SEQ ID NO: 77247 - DNA, 367 bp, Oryza sativa
  unsure (1)..(367): unsure at all n locations
gcttcactacagaggtgctagggtgtggctagcaattatggatgatctgcttgcgaaaggaatgaacagtgccaataatgtatgttattcttatgagcataattcttgacaacaagaaggttttcaagactaacgaatttatggcaggctctaatttcgggctgttctgctggtggtttaacttccatactacactgtgacagatttcgtgaccttttcccagtggataccaaagttaaatgcctttctgatgctggtttcttcatcaatgagtaagacaatactagtacaaaaggcaggtgaaggaaaaattaaatgcattatgtantttttttcacattaaggatgtactagccattttaatatg

SEQ ID NO: 77248 - DNA, 432 bp, Oryza sativa
tatccagaagagaccgagttcaaagagaatgcggcatggttagttatctattaattaggaatagtttgttagtttacttttatctttaagaaagtgtgtttagtgtcctataaggactttatcttttccttttatctttaggaaagtttcttttttgtccgacaaggacttgtatctacccatgggtataaatatgtacacccagggtcattgtaatctatcctcacgatcaatacaattcggcgcatcgccaccatttttacttttacttttgtttctacgttccgccggaacttggcacccgacgcggggctgcatcggtgttcgatctccggctaaggggtaagtccaatgttccgtcggcccagacaattatatcgtctacgtcggcgtcggttaaggctgcatcaggacattcgatctcttggattg

SEQ ID NO: 77249 - DNA, 420 bp, Oryza sativa
  unsure (1)..(420): unsure at all n locations
ngcttatggtcattgagtgtttgacgagtgggtccaaattatcactctaatttgagcttgttgctacaaccgatgcccgttcctatctttaaatggactttaaaaaacaagttctacgatgaatcttaaacttataatcccatgttgggcatgctctaaatgggtcatgggctcagttgggccagggacctgtcacctcaccaccttctccatcgtaccccttaaattggggggcagttcggtcatttcgctggggcggccgttgggtcaaaccaaatagaccgaccgaccgaccgaccgaccgcacggtgcaccaccacagtcagtcgctgggccgcgcgaacagcaatttcttcgaggcccttggaaacgagagcccgagccgacagcgaccacaggagccataccccaaccaaacca

SEQ ID NO: 77250 - DNA, 423 bp, Oryza sativa
tcagaaggactatcctcttggacctctccagaagcgtgttgctgatctaaaatctaagggtgagaaaaggccattggaagctgggcgccataatgcaaagaagcctcgcactttcggcaattcagctgctcgcaggccaccaaatcctgttggttcagctggtcgcagaccttcaggcccggctggtacttggcagcggccccctccaccaatgccttcctatcctgatcgatatggacatgcagatcggtaccattacactgcaccctctgcaacatatgatcctcctgcttatgcttcttacagcgaaccatacagtgcctcaaagccataccagtacacaccaggctcagtagctcctgcatcatacaactcgaatcagttcaaagtagcttatggtggacctggtgccccgccaacagc

SEQ ID NO: 77251 - DNA, 315 bp, Oryza sativa
  unsure (1)..(315): unsure at all n locations
agctntatgcctccacacaaacctgaacattactgaaatctatcctatccgttgcgacaccaccgacttgacacatgtcattactcctttccctggaactttgaaatccttcccctgccgctacctaggcttacctttacattttcgaaagcttaggaaagtggatttcttgcctctaattgaaaagaatggatcgcgtctccctggctggaaagaacgctacttcatgtcagaaaggagaagaattcttgtgcaatcagtgttgagtgcattgccgacctttcatctaactgcccttcaagctcccaaatgggt

SEQ ID NO: 77252 - DNA, 434 bp, Oryza sativa
tattatcttcagagaagttgtttgtagcatctaacacttgtgataatttgaacgatgtgaactctgaactacatgcttctcttccccaggccaatgcttcttcatctgtctgcatattcatatcaccctgcaagctcacttcacctaaattcagaattgaaacaattctttcagtaaaaccgctgccgtctaattttctcggaggtgttctaccatgctttctatcggtagtagaattaatctaaaccatttttctaatcaaatacaccatatctatttgtactaacctatcaactatatagaataatttttccgacgagcggtacaactcataaatcaaatgttgagatacttctagtgcgataatactggtagtagagcaccgctcattttcttgcacaattgcgtggctaaattacaagtttctccttcca

SEQ ID NO: 77253 - DNA, 367 bp, Oryza sativa
  unsure (1)..(367): unsure at all n locations
agcttcagatttgaatcttnttggctcaaaattcctgggttcttggaagcggtgcaagactcatggcaacggccgatccttgccactaattgcctagctattttccgcatcaaactacgatgtctcgctcgagatttaaagagatggagtcggagtcaagtgggtgatattaagttacaacttgcggttgcatctaaagtggtctttcagctggacatagctcaggaaactaggactttgtcagatgatgagcgcctcctggtgtctaacctcaaaaataggattctggctctatcagttctaaacaaaatccagatcagacaacgctctatgcaaaccttgctcaaagagggagatgttaattcaa

SEQ ID NO: 77254 - DNA, 248 bp, Oryza sativa
  unsure (1)..(248): unsure at all n locations
taaggctagtaatggctggtcggacaagagttttacagaactccttgagctgttaaaggatctgttgccagaggggaacaatttacctcagacgacatatgaagcgaagcaagtattatgtccgttgggcctggaggtcagaagaattcatgcatgtccgaacgactgcattttgtattacaaggaatacgctgacttggatgtctgccctatctgtggggcatcaagatacaaacgagcanagagtg

SEQ ID NO: 77255 - DNA, 356 bp, Oryza sativa
  unsure (1)..(356): unsure at all n locations
ttcgacaaggggttttctggccaaccgccctcaaagacgcttgtgacatggttcagcggtgtgaagcctatcaatttcacagtaaacacacaaagctaccagcgcaagcgctccaaactatccctcttacttggccgntcttgtgctgggggctcgacatactcggaccattcccacgaggacagggcggctacaggttcctattcgtggcgatcgacaaattcactaaatgaattgaagcgacacccacgggggaaatcaaggccgacatgttctgcagatatggattgcctcaccgcatcataacggacaacgactcctaggtcatcagtgccgacttccaggattactgcatc

SEQ ID NO: 77256 - DNA, 390 bp, Oryza sativa
  unsure (1)..(390): unsure at all n locations
agctnttgggtcccaccccatggggatggcccacggcccgagagtgatgtttccgatctgacgaaaaatatctaaactgaagatttcagtatttcttccggctccaaaatatggcaacataataattatgcagatttgtactaatacgacttatcgcatctagtactcacggttgataatatcgtttaaacttatcattttagataaatgcacgatctagaaaagagtaaatttatcattatattttattacaatatatatagaaatattaaattattgatgtactttataagactaacctatgcatttagtcactatatttctaaccaatttttttttataaataatagtaataaaaataaatatgtggtaaatatggggtttaaatta

SEQ ID NO: 77257 - DNA, 413 bp, Oryza sativa
  unsure (1)..(413): unsure at all n locations
ntaaacagagtgaaaagggataagcacaagcagacctgtttgatacgtcaagntntgtgcacagatgatctattaacactcaaactttggttactctttttggtgctatctgaattctgaaatcgtatttatcctcttgcttttaacctttgcagctgaactactcatctaatccgatttgacagtgacacactcatttcgctctcatttatcaatccatgtcagcaaagttgccaaacaatacctccgtacaaggaaaccattttgatgaagcttttcgtatcctttgcattggtctaaacggtaagtaattctgacacgtcattagttcttccagcaaagcttgttaaatcaacctactagtccgatttcttcaagcgaagttattctcagntctaatcctcttcttgctg

SEQ ID NO: 77258 - DNA, 386 bp, Oryza sativa
agcttggcgcacactaaggagtgcgagagcttataagatcactcgcagagtcccctacctggcgcgccagatgacggagcgtggggctcctcaccgggagaccgcgcaggcccccctttgccggttcggccggggaccctgggtgagactctaagctcccaatctgtggaaggttcccgagacaggaagcacacaagacgccggcgatgtatacaggttcgggccgctgagaagcgtaataccctactcctgtgttttgggagaactgtgtatgaaggagctacaaagtatgagccagcctctccctcgttctagggtcccaatctggagaaggtcccccaaaaaatcatccttctaaggggcaaggcctcttttatttttaaggg

SEQ ID NO: 77259 - DNA, 427 bp, Oryza sativa
  unsure (1)..(427): unsure at all n locations
tcctttagtagattgatttccttaaccgaatatagcaggaattcgactattggcgacttgataactcccatcagctgattccgagatgctgcaaccgataatgattctaagccgatgacgtctttgccgattaccaaattttactgttaacacatagggctccttgtgtcgtgtgtgcatgtctctcatcagctctgagctatgcggngataatgttgccttgctactgcgcggccacttaacaaccataggccggtctcatcccacaacatgcttgatggattgggtggccaggtgtacaccggggtactggcccctacaacttatatctgaaaatctagtaagtgggtccggggtctagtttctggtcactttcacttatagttgaaaatctagtaaaaaaaatgttgtcacctctatagcttat

SEQ ID NO: 77260 - DNA, 437 bp, Oryza sativa
  unsure (1)..(437): unsure at all n locations
aggctgaattacatgataaatagcttatttgtgatggttcagntgttacttgtgtactctgtttttttcgcacatgattataacacggatgaagaaacaagtattaagtatttaaatgttgactcagaaaaaaagtaggatctcaaatattgccatctatatataaacaattagtacaaaaatcaaagcaaaatatagtttatttccatttatcatgcccataaattgatatttttattttataaggttgaaatatgatactagacgcaaaggacatgtagaagtaattaaaaaaaaggctatgccaccaattagtggttatcatgcaactgtgcgatcctggatccattgtcttggcaacacatcctttgtaacacgtattttgtgctcctacctcacttttctagagctatattttacatcttttgaaaatgtgt

SEQ ID NO: 77261 - DNA, 431 bp, Oryza sativa
  unsure (1)..(431): unsure at all n locations
attctgggtccaaaacaactctgaatggtaatngggataatgttctcatatctctttctggtcagatgtttggactgggtcctgtcctttgaaaacaaatctgtaaccaacaagagattctggtgcctgatgctctggcctcttggcctgaggggatttctttcagaaggtcttttggcccggtggaggtggagtgggaaaaccttgggcaacgaatggctgaaatctcttactgatgaggaagacatgatgctttggccttttgagaagaacaaatgcttttctacaaagtcttgctacaaaatgctaaactttcatggggtgaaagatatgagaggactagatatttggcaagagccaatgccccagaaggtaaagcactatgtatggcttgcttggaaagataagattcaatccacctgctatctggg

SEQ ID NO: 77262 - DNA, 247 bp, Oryza sativa
  unsure (1)..(247): unsure at all n locations
cagcatcaancttgagaccccttggcaatgcgcctacaacattcttgttcctgaccacctcgcatagggggaaagaaaagatgaccgtgactttgtgggcctagaagtagtgaagcgggttccatgatgtcataatcacagcgtagagcagcttctgtatttggggatattggggtttggcgttgtggaggacctccctgacataaaatatggggggttgtactctgtgcctctcacaactattgac

SEQ ID NO: 77263 - DNA, 444 bp, Oryza sativa
  unsure (1)..(444): unsure at all n locations
tcatgtcaagatgaaacaatcatttaattagccaacgagtttactccgggagtcattatcttcgttcttcgcttcagaacaagcattttacttcaacaactccaattatttcactggcaattttggcttccagatgctgccataatctacttcaaatttctcaaatatcatattcaagatttaatctacatgtcctggtcagactcagctttgcacctggatatggctttgtgcttcccaagttcgggcgtaaagagtttggagttatcaaacaatcaatacagattcgactattagttatgaatntcagaattatgaaatcatgaaaaggctatgttaagactccaaccaagtacaactcaatacttattaattacaaaatctaaaaatatgactaagaagttattgtcaagaatccaaacctacttcaataatatgtattaa

SEQ ID NO: 77264 - DNA, 438 bp, Oryza sativa
agcttgaaccgttgctcgtcccgagtaaagtatgaaaggaacaaagacttggttgtttattaagagttgctgcaatgttgtatatatcaaagaaacagatgcaaggtatgggtactctctctcaaaacaaataagtttggcacgggggcttacccttacccccgattcccacgagacactgcctttccttgtcttgagcgcgtgagagacagaacaacaatttgagcgctagttacccattctctattcaacttttattacgggagttttcaaatgatttttgcaaaagaaagcaaagttctcacatgattctctaaatcacctcaagtgtatgaatatgattccttaccagattgccttttttattcctactctaaagttgatatgtggagcttgtgagggatcaacatggcatacttgcattcacatttattacta

SEQ ID NO: 77265 - DNA, 447 bp, Oryza sativa
  unsure (1)..(447): unsure at all n locations
taacataaaaccatgccacattatcacccactagctataattatatatttaatctcatgtatgcatgcaatatcatctacaatatatttaattatataaattaacatgccagcatatccaatcatcatgacatcacccataatatttccatagatctatctttntgtaatatatttaaaaataaataaaaaaatgtttcacattaaagtgtgggtatcatttttttttactcctaactcgattatctaaaaaatatattaaaatttactccctccatttcaggttataaaacattttgaagtcaaactgctttaggtttcaccaagtttttagaaaaaaatagtaacattttcaacccaagacaattnttttatgaaaatgtattcaattattgatttgatgaaactagcttaagaatataaatattactatatctatttataaatt

SEQ ID NO: 77266 - DNA, 421 bp, Oryza sativa
  unsure (1)..(421): unsure at all n locations
tcttgctcttggaactntaatactaacatattagttggttgtgacacaatcacagacatagctcacaaagagggtctgaggaatgctgtacttgggcatttccgggctcttgtggctcaattgcttaagggagaatgtattgatctggaaaatgacaatggatccaaaagctggcttgaaatagtatcctccctagcttggctagctgctggctatgtgagaccagataccaagaaaggtggcagcatggatcctactgattatgtgaaagttaaatgtttagcatcaggggatccaagtgataggtatgttcttagctttgttgtttgactggtttttacatgtttgtactttccatcatatgaaactgatgggtgttccttttatgcagcaatcttgttagaggagtggtttgctctaa

SEQ ID NO: 77267 - DNA, 315 bp, Oryza sativa
  unsure (1)..(315): unsure at all n locations
ctgaggcatgcaagcttncccttcgaactttctactcttntgctttctccattaaatgcctgcggcgaggaaagaagaaaaacaagagcaaaaaatattcaattaacttccctatgaccaaattgtcgtttttaccccaccccccctcgggctcgttcttgtgaaaaggtaaatccgcgctcggcctgggggacctaaatggtgaggggcaagaccaccgccccgagggaagccgcctaacgggtctggccagaccgaagctacgacgaccgggggttggggacggccgtgtgtangcccttccgagcccccggg

SEQ ID NO: 77268 - DNA, 431 bp, Oryza sativa
tggtgtcctcgtggaccgaacctcggggtatgagcgggacatgggagtggcggcgcagcgtctcgtggaagacggcgttgaggtacggcagccgcggcaggtgctcctcggtgaccgtctcgtcgccgcacacctcccggatttcttggtaaagccgttcctggcatgaccagaaaaacgcccaaaagaaaacgtttgggttgataatgccaagaatgagctggaacagagtaacaaatatttcttgcctgtttgtcagggttcttggcaagctcgtacatggcccattctgtggcgaccaaggtagtatctgcagcctctatgagttcctcccacaccagcatcgtcagttgctcatctgtcagtgtgttctctgccagcaagaagtccagatagcatatctttgcctgcatatttatctcagtttcatg

SEQ ID NO: 77269 - DNA, 389 bp, Oryza sativa
  unsure (1)..(389): unsure at all n locations
agcttgtcggaattaaaaaaaaaaacagcttgttctagccgattgagtggagaaaaacagagatttgagaaaatagaataaacagattctaattatatcggaacatattgccttgaataatagctagatacatacggagtgaaagccctatacggttgcacagctcacacgtgtctctagatatggacggacctgcgctaaatataaatttcggtagacacaacacatcaacagcctaatcaacttggcatatactactccctccattttataatgtaaatcattctaacatttctcacatttatattggtgctaatgaatctagacatatatatctatctagattattagcattaatatanatatgagaaatactagattgacttaca

SEQ ID NO: 77270 - DNA, 431 bp, Oryza sativa
attacggacacatgaaactcagctgcggccttgcctactgcactgcagaacaccttttgatctacgagtgcaagtgcaagggccaccagatctacattagaggagaggacacatgcctaggtgataatacatcacataaaaatctactccctccatttcataatgcaagactttctagcatttacccacatttatatggatgttaatgaatctagacacacacgtgtctaaatttattaacatctatacgaatgtgagcaatgttaaaaagtcttatattattgaaacggatgaagatagttccaatttcatgtgacgatggcatgaaacactttgcttttcgacatgaaaatatgaaacatagctaaattttgggtttataatgcagcccacagcatgtcaaggttcggctggttcatcactatattggt

SEQ ID NO: 77271 - DNA, 375 bp, Oryza sativa
  unsure (1)..(375): unsure at all n locations
agcttgccgcttttccgtatacctgcagcagtgcaaaaaataccattttgtttgaaggaaagattgtttaggccatgtttgtttaggtttatacgatcggtttatgagaagtttaagtctaaacaaacaaatcaatttattggttcggcttttttaagccataagaaaaaactacatgtcacagnnagtttttgggattatggaaagtgtattttttactcgaccattaaactcaggcttcgaagtcactgtcttacaaaaacatcctccattcaaaagagttggcttaaaagctagtaaacctaaacaaaggctctgtttggatccggaatcttgctatttagtagtattatacgtagattactgacaaaaccc

SEQ ID NO: 77272 - DNA, 427 bp, Oryza sativa
  unsure (1)..(427): unsure at all n locations
ntatatagctgccccgctggcttttttatatagtcatggtgctgtttgggtttttaagcaattgattggatacaatatcattgctttttgccacgtaagtgtgcatttttattgaccaatattatggcttaggctgattatatattgtggtcatttttcaggcggttggtaaatcctttatgagtttatttactcggattttataccacatatgccatatatttccaggtgtggtggaaccatgtgtcttctagggacttaagcacatctgttaaagcagtgtgcgcatggcgtatgcccaatactttggaaatttctttattcacaacatacaagcttctttatagctattttgctgtgtgaattttcaatgatgtagccaactntaggttacactcatcatattttacaaagcagtcggtatatc

SEQ ID NO: 77273 - DNA, 287 bp, Oryza sativa
tgatgggtatttttactctttaagaacaactaacaaagagtacaatatgttggacacagaagcttgatgggctcatttttatgataatcatttatcagttgaatatctaacaaagagttcaatgaatcacttctggacattgttaaaatatggtataaaagggatccaggtacaacagtatgggatttacagattcacaatgcttaatatcaactacaaaattatctagattcacaatgcctaatatcaactacaaaatcagcaatgaaacaaggatttaccatgat

SEQ ID NO: 77274 - DNA, 429 bp, Oryza sativa
  unsure (1)..(429): unsure at all n locations
tgatgggntattttactctntaagaacaactaacaaagtgtacaatatgttggacacagaagcttgatgggctcatttttatgataatcatttatcagttgaatatctaacaaagagttcaatgaatcacttctggacattgttaaaatatggtataaaagggatccaggtacaacagtatgggatttacagattcacaatgcttaatatcaactacaaaattatctagattcacaatgcctaatatcaactacaaaatcagcaatgaaacaaggatttaccatgatccaggagatgagggatcaccgccggccgcatcaaaccaaggttgagacgatgcatggggaccaattgagctggtgaagtcacctccgacagaaccatcaatggagaaatgccggacggtcgtcgctgccgctactgacccgc

SEQ ID NO: 77275 - DNA, 380 bp, Oryza sativa
  unsure (1)..(380): unsure at all n locations
agcttgactatccttgcatcaagatatgctctgaaccttgagttttccttcatggaaggtgcttacagccaattattcaatgctcgtcaaactgttccacatgaggcttatgacttctttatagatcttcttgctgaaactatcaggtgagcacattgcacattcacgttccaggnttttcatgtttggtttctgttttgaagttccttaccatgttctttgtgttcttttgtagagatgaaatagctgattgcagtgctcaggcatatgactacttgtcaatatcttatgcaaagaaaatgctattgttttcttgtgaccaacagcttcttaagttcatatcagaggcaagtattattttcttacgctccttttatccc

SEQ ID NO: 77276 - DNA, 433 bp, Oryza sativa
  unsure (1)..(433): unsure at all n locations
gagcaatgctatacgtactaaatnntncttacttaacttttactaacaatcatctcaatcgtgtgatttaagtagatggaagttacaaaaaaatctagatgcactcatagcataacagtgttagtaaaaatttagtaaaaaaaagttactaggtatatccttttccttaagtaggtgcacagcaaggctccaagaaagtacaagttgcttaccgctggcacggcagcatgggcgcacgcgtactaagtcaaaaaggaggaagcggagggttgcacaagtccgactttgcttggaagttgcaaccccatacttggagatcctgtgactccaagttaacaacttgcactatgtttagcttttaattaacctcctacggtaaaaacaaaatactatgatttttcccctcaagggaatgattatcttttttcctaat

SEQ ID NO: 77277 - DNA, 411 bp, Oryza sativa
tcaattcaatagtcaaggtagagtagaaagggggggcgtgctacttaacgcaactgcacttggctaagaaaataggatagagcagagagagcctaatctcccgcttggtcattgaacaatgagccgaggtgcgatgagcggttgagtcacgcactacaagatggctgaaggtatctgcctgcccctatctcgtctgcttctactttgcggagacttgctttgacgagtaaacatgtaccagtggtatcgctttccgttttgagttattcccggtaattaagcaccttctatacgccttggtcttggaaaggcaaaaccatcataagcgggattaaagaaaagtaactcccatcctataagacctcggatcatcccttcgtctgccagtgcctggtcaatcatggcaatagc

SEQ ID NO: 77278 - DNA, 348 bp, Oryza sativa
gcttggcatacaatgatgttcccgcaactttccctacaccaaacggagatctctgattgcgagtacaccaggatgtcgtcgatgaagaccacaacaaacttatccaagtattccatgaacactttgttcactaaattcatgaagaaggcaggagcattagtcagaccgaacgacatcaccgtgaattcatacagcccatatcgcgtggtgaacgcggccttcgggatatcttcttcacgaataagcaattggtgatatccggagcgaagatcgatttttgaaaaaacagtggcacctttaagctgatcgaacagatcatcgatccggggaagagggtactctgttttg

SEQ ID NO: 77279 - DNA, 440 bp, Oryza sativa
  unsure (1)..(440): unsure at all n locations
tggttgaaaaaggccccaatgtaaccatccggatncaggggcttaatttttatatggcatggagaagatagtctcctttaattcaccttgtgctgtatcctcctggtcttatagtagagctatacatttggtaggtttatcgccgaccagttcaggcaccgagatcgtcggaacccctaggagttgtgtgaaaaaacgatgaagttctttcttgtcttgagtggttacatcccttgatggggtttgtaacatctatgtataattctttctctcctctggcatctgcttttaagtgaaagaacagtcaattgacatcaccttctttggtccaagttagccttgccttatgtctaatcttaatcttgtttaaagtagatacaacaccaccactattgtctttagatatgttctaagctccttttcagcattagttatgactc

SEQ ID NO: 77280 - DNA, 381 bp, Oryza sativa
agctttgatacgcacacacgtggtagggccatgctctatccttgagtttgggtgggccacgtgccccaaatactattgggctacatcagggcgtcactagttcggataccttatgtattcatcaacaaaaaatgcatattttctatggaagaattaattatgtgttacatatttgaacaaatattactgccccaagaattttgtgtgtttttgtttgtagaggcacttgcttgggtgaagagaaagagattaagcacaaagaatgtctggttgatcaaataaattgattgatgaccaaatcaagaccttccacaaatctacttctacattatcacatcacttgcggtccatagaaggggagagaatacattctacatattt

SEQ ID NO: 77281 - DNA, 450 bp, Oryza sativa
  unsure (1)..(450): unsure at all n locations
actatacacaactcaagcttcananacctgttatccaaagaagtacactnttctttactggatccagattccactgaccagtatggattcttataataagttaacagcaacgcttgaaagacgaacacctgctctccagctccagcaaaaatggttgcaagctctgcctctctgctccttctcctgattcatcctcttttgtgcatatcagcacatgatttcctctcgccaggcgcatctctatctgaagacgatgtgctctattcgccgaatggcgatttcgcctgcggcctctacaagatctcccccaattcctgcaccttctctatctggttcaccaactcggctgacaaaacaggtgtctggagcgcaaatcctctccaccctgtctacactcagggatccaaaatggagttgaaatccgatggcagcatgggtttgacagataat

SEQ ID NO: 77282 - DNA, 413 bp, Oryza sativa
agcttggagttcacaaatgcttcagatgtggttctgatcagagattgcaaacagaagaagagtgtacagacagagtgtctgcaatctgattagagtcctccagatgtctgcatacagattgtgaagttcccaatttgtaagacggggatgagaaacttaagcaagctatgtatacttatgtactccagaatatatgttgtgtttttaccataaataattatccaaattggtgaacttcatcagttcgtttaaaacatatgaaggagggtagagctgtagaaggtccaggtttgttcctaacattctttcgatattacccttttgttgaagagaaaacaatcagtaaacgttagatttcattttgtaactctaactaaaagataaaacatttggtacttttactgaggtattac

SEQ ID NO: 77283 - DNA, 430 bp, Oryza sativa
  unsure (1)..(430): unsure at all n locations
ntcactgtactattccaatatgtgttgtatctgcccgaataccgtatcgtcaaaactatgtggttcgatttactggtgtgcttggtctgtacgaatacaaacggcattttccttttattagggcttgattatgtagtatacagagtcgagggctttagtaaactcatccgaatatcgttcatatatttttgtaaagaattcgcttggtgggtgctattgacatgctctgtttctacagatggtaacataactcagaagctgttgttaatcacattctcttaggcacacttttcctgattatgcaaattgtgcatttgaaaacattcttgaaaactcatgtatgtaaaaacatattggaacatgcatgtggtttcataaactttgttgcaaaatcatgagaatattccaaaagaanaatgtgagataacca

SEQ ID NO: 77284 - DNA, 393 bp, Oryza sativa
ttcgcttctgaggccactattttcataaggcgaaagtagtctaactcatcaagcacatcctctgcatcataagctgaagacttcaaatcccaaactagttgccagatgccctcctccatcacaggactgcctttcagggtcataagtattgccttagccatatcaagctgacgacagaggttttgaaattcacctcctaagtttgcacgaactgcccactgctctaacttggagcttaggtacttgtcgaagattacttgcatgaatatcccaattgtgctcccaataatccctgaatccatggcaggctgaaacgaagagggctataaaacgattcctttatctgtattgtgtgcgtgctatggagatcgagttaccagataatcattgttg

SEQ ID NO: 77285 - DNA, 404 bp, Oryza sativa
tcaggagttcttgtcacgtctcgaggaagagatgctcatgatcgacgccttcaagcgtgagctccctctctgcatgcagcttctcaatcatggtgagtaattgtatgtaacctaagctaaatcgatcgccatggctaaccctagcgaggattggtgtgtgtttgcagctatggaggcgtacaggcagcagctggaggcgtaccagatggggagccagcatatcgccgcggcggcggcggcggcgagggcgccgctggtgctcgaggagttcataccggtgaagaacatcgggatcgacgtcgtggcggcggacaaggcggcggcggcggggggcaacagcgtgtcgtctgagaatgcgagctggatggtgtcggcgcagctgtggaacgcgccggcgtcggcgt

SEQ ID NO: 77286 - DNA, 361 bp, Oryza sativa
  unsure (1)..(361): unsure at all n locations
agctntgaaggtgagttggccatggcatcttgtgcttgtataccaaaccacctacgtgttcgtccatggcgtgcttgcgttctatcgtcgtggtgtcgagctcgacggtgaacacccacctcccctgcgccggccacaggaccacttgcccaacacggccgccggcatgcaagaatggcggtgacgccgttgccggagagggaggagaacctatcgtcgtcgttccgatcggcatgtggcggcggcgcgcgggtgatctccggcaagctgacgcgattcaggagcttccacccgtcctcgtctcgccagcgcgagaacaccctgagctcgccgccggacaagccgacgatgcgcgcggcga

SEQ ID NO: 77287 - DNA, 431 bp, Oryza sativa
tgctggtgcttatggaatattaaatattcctcctgggatgtctatccgagttataaaaaacctcagggtatgtggagactgtcacaatgctttcaagtatatctccgcaattgagggcaggctgatcctattgcgtgattctaaccgatttcaccactttagaggagggtcttgttcctgtggggattactggtgatggctaattagatttcttgtgcaatgaatccctgaagaatctgtagttgacaacgcaacaaagatggtgcaatgcaggctacaaacaaaatattataggcatcttgatgactcactcggtccacaggccttctactaggccaccatttcaaaaagattacatgagttggtgattgtttccatgctgagtgaagaggtgatacctagacaaaagcataatatacaagatcataatt

SEQ ID NO: 77288 - DNA, 443 bp, Oryza sativa
  unsure (1)..(443): unsure at all n locations
tgatactctaaggcacctgcggcatgcaagcttcaacattgcgaccgatctgagtagataaacatctttgaatcatgcgttgataggtcgctcctgcattcttcaatccaaagggcatggtgatgtaacagtaggccccaaagggcgtaataaacgaggtcttcaagcagtcggattcttttagtcggatctgatgatatcccgagtaacagtccaagaaactgagtaacttgtagccagccgctgagtcaaccacctggtcaatgtgaggtaacccaaaagggtctttgggacaagatttgttgaggtcggtataatcgacacacatgcgccattaccccgtctttttccgaaccaggactgggttagccagccagtcgagatgaaggaccttcttaatgaagcctgctactaacagcttggntaaatccttcttgatcgca

SEQ ID NO: 77289 - DNA, 430 bp, Oryza sativa
  unsure (1)..(430): unsure at all n locations
tgagtaataagactagaatgagctaatcagtccattntattagatcatttacaacatttgttataatgaacgaatgcctgaaaacaaatatgaattatcaaagaatatacctagctcctgaagattaacattcggggaaaggaaagagctttctttcatcttattcgtatgaatttgaagaatctgcaaacggccattttcatcaggcaggtttatctcaatatgaacttccaatcgtccaggcctgtaacagatgtgtcaaatgtcaatggatacgtgcaaatagtaaaacaaaaatacaaaaagaagattccccaatggtttaggcctgcaatatctaaaataatcaaggcaagcataattttctgaattacacagtaaatgcagcacagagttatgtttagatattaaaatgtacattaaatgaaat

SEQ ID NO: 77290 - DNA, 409 bp, Oryza sativa
agcttcccaaatagatcactggaatagagcgcaaaaagaaaagcacagagaattgaatgggtcacgatgcatgcggtatcattcttcagctcaagccttgcggttgccggatgatgaacctttctggtctaccgggtccttgcttccaaccaagtctctgtaacgctgttcccagtcatctagctttccgtttgatatgtcagcatgaatggcccttcggatgccttttacaaccaaaaagtactggagaagagcatggtaaacataagtgaggcattatgttgaggcaaaagatgaaaatgctgtgctcagatttagaactggtttggtttaaaggagctaacctccaccataaggatgagcggtatgaacatctttccgcgattgttgggattggaccatctattaa

SEQ ID NO: 77291 - DNA, 387 bp, Oryza sativa
tacccgcaggcacgccgaacacgcacttgtcggtgttcatctttatgcgggcggtgcggagactttcgaaagttttcgctagatccgagagtaaggtctcttggttgcgtgtcttcacaaccaagtcatcaacataggcctcaacattacgtcctatttggctacccaaagaaattcgagtagtacgttgaaaagtaggacctgcattctttaacccgaaaggcattgtcgtataacaataagttcctatgggggtaatgaatgcagttttttcctcatcctccctagccatgcgaatctgatgataaccagagtatgcatctaaaaaacacaaaaggtcgcaccccgcggtggagtcgacaatctgatctatgcgtggtagggggt

SEQ ID NO: 77292 - DNA, 439 bp, Oryza sativa
  unsure (1)..(439): unsure at all n locations
ntgacaagntagatttgagcgtgtttgcatatttcgtactattcaggatactatgcattacatttccatgatactataatatggagtaatctggaattagatggttcacgaagaatgtggtgatattttatattaatctttaatctttctcgtggattagcaactgaaaaaaaaactttntatatgcgtgtctttaccgattaaaaagggcatactgtaaaatgaactacgacaaaatacaacaaattcaactccaatgccacaaccagccaacagccagcgattgtgactcaatgttgaattaattgataaaggaaacaaactatgggccttatgggcctaatcgacccatatgacctgactgttagagtccaatgccactgccacaaccaaccaacagccaacgatttgtntgtgtgtttgtgggtattatgacgtg

SEQ ID NO: 77293 - DNA, 373 bp, Oryza sativa
agctttggagaagaagtcttatgtggagtcctggcttataccccagttgagcgcctgtgaagatggagccgtaggcccgctaatccgctgctgtttatttatgattgtcacgccttaagtgcctttggaataatgtaaatattatcgatataataaagatgtgccttttgtatcatgtttggggggtgtaccccggcttttcctgggacggggattaatacactagcgttcgggaaaaggcaaatttctcggtcgcgacacctaactaaactatcaactcaattgctctcaaaattgaaaccgggaagcctcacgctccctctttatttatacatgaggtagggagcctaaagccacgaaacaaactcatact

SEQ ID NO: 77294 - DNA, 419 bp, Oryza sativa
tcctaaccatttgaaggatctctatgatataatcgtggaaagatgtgggggcttgccgcttgctatatctagcgtagctggcgcactagcacatcgtttttcaaaagatgaatgggagaggtatgaatctaacttgctacctagttcacattccgatgagctgaacttgaagcaaatacttaatctgagttacaacgatctaccttcacatctcaagtcatgtatgttgtatctaagcatattcccaaataaatatgaaattgatgtggagcgcttggtgaggcgatggattgctgaaggattcatcgctgatgcacgccatgcaagcaaagaggagacagcaagaagttaccttactgatctcattagcagaaacctgatccaggcattgcatctgagacataatggcaccccaagct

SEQ ID NO: 77295 - DNA, 319 bp, Oryza sativa
  unsure (1)..(319): unsure at all n locations
agctntatgtcatgcatgagaccgagctatataagattagcccctcaggaattctgcaatgctgtgtttctttggaggagggaaggcaattgctgcaagacattcacaaaggcatttgtgggaatcacgctggcgcgcgaacaattcttggcaaggcttatcggtaaggttttttctggcccatcgcagtatctgacactaacaaaattgtacgaacatgcgaaggttgtcaattttttgccagacaaattcacctaccagctcaggagttgcaaaacatcccattgtcctggccatttgcggtttcggggcttgatat

SEQ ID NO: 77296 - DNA, 443 bp, Oryza sativa
  unsure (1)..(443): unsure at all n locations
tgatctntccatcccgacaacagaagcctggcgggtcgtactggaacctcttggcgccacagngtttacagtcaggctcagccttcagaacatttgtgctttgtggaatgttgctatacacacagtcgaacggatcaggaactgaagaggtcggtgattgcgtgtcgtcgtcatcagattgtaccatctcgtcatcgtcatcatcgcctaggattgtttagcggaaaaggagtttagttttcaaaaatctatacaagtgaaagagagatttaagtatgaggacgatggtacctatcccagcaaacatgtagtattcatcgtccgtgtcatcatccatgaaggaatccatatcatctttagtggaatgaaaagttagtgtgcggaagggtacaaaattgcgagtatgaatgaaaacatacatatatcataccatcatcaaaagt

SEQ ID NO: 77297 - DNA, 403 bp, Oryza sativa
  unsure (1)..(403): unsure at all n locations
agcttgtctgttcctcacgagtgatgttcttgtggtgattanacccatgcaaagacgaagggctacatgacaagcctttnttttgttcaccaataataagaatagctaacgttaaggtggactagattacaagggcctaatcattctgttgggccaacatagtgtgtccaagaatggtaggcctttgtggtataatagtgtggtaaattgtggctgaacatgtttgctcggatgctgcttcagggttcaagaaggatttccatttcctggacctgacacttgggatgggtattagggactctgttttctctggttcagaaagatgaagccatgcatgtatgcactatctgatgatattttattgttaaatttctcagcagaagagaacatgatggaacgagtg

SEQ ID NO: 77298 - DNA, 342 bp, Oryza sativa
  unsure (1)..(342): unsure at all n locations
ctaacaaactcagctgatggatccggtttgcacgaataattaataattaatattccattttgtcgcgaccgagaaaattgccttttcccgaacgctagtgtattaatccccgtcccaggaaaagccggggtacaccaaacaaacatgatacaaaaggaacatctttattatatcaaaaatatttacattattacaaaagcacttcaggcctgacaaacaaaaataaacagcagcggactagcgggcctacggctccatcttcacaggcgctcaactagggtataagccaggactccacctagaacttcttctccaaagcttctcttactgaggggngggggg

SEQ ID NO: 77299 - DNA, 412 bp, Oryza sativa
  unsure (1)..(412): unsure at all n locations
cctagngcctatgatactgtgctcaccttgtgccacaactttgtccctgtcattctgcctggtttgcattgcgatccttcatcatgctacacatggccaaactaagtcttgtcgagattggggatggtaatcctgctaggcggaaacgaaaaggatcagttctatacacatggattttacttcgcccatatgagaactgtagtgttcacttcaaattttgaaatacctgcatgaaaaatgtgggatcttagcatgcatttttttttatgctagtgaagtcaaactattgaaattggtcattattgtgagaagatttatattgtattgtgcattttaaatagctatgcgacaatctcaattcaatttgtataggcaaagtactctttgccctgtaaaatcatggttatgatat

SEQ ID NO: 77300 - DNA, 430 bp, Oryza sativa
  unsure (1)..(430): unsure at all n locations
taattgatttggtnttcttgaaggatgactccatctctatcggagcaaagctcggaacagctagatgaagccagctctcatccgatctctaccattgtgactcctctccctgtactgccgctagcaccgagcgcctctcgaaccaagtcacccagattggtccttgaccatcttgccaaggcctaccgagtactggagaccactgcccaggaagccccctttgaactcaatcatctttacgtggagatgggttcggcaggggacaaggtaaaaaagatggagtatggcgagatccgacaacaacaaactttgtgaactagtacgggacaacaaggccatccgcaagaagggcgaagatgtgctgatgaaagagaaggagcccttggtatccctctaagaaggcttggacgataacttctcacactttaac

SEQ ID NO: 77301 - DNA, 404 bp, Oryza sativa
  unsure (1)..(404): unsure at all n locations
gcagcttgccctttcaataggaccagcagctgtgtgtgtatgctaacctgggggtgattttgcagcctgacatcaccgcgccaggagtcagcgtcatcgcggcttacagcgaggcggtttcgccgacggaactctctttcgacgaccgccgggtcccctacaacataatgtccggcacctccatgtcgtgccctcacgtgtcgggcatcgtcggcctgatcaagaccaagtaccccgactggacccccgcgatgatcaagtcggcgatcatgaccacaggtgagcgagaaatgcagatcgcgatcaatcgagccagcgcanacatcacataaactctgatcgatctcacgtccttaatatgcctgtgccttgcagcgatcaccggtgacaacgacagcggcaag

SEQ ID NO: 77302 - DNA, 417 bp, Oryza sativa
  unsure (1)..(417): unsure at all n locations
ttgatctagatccggnttcaattntcatttgtgtgggcgttattctttaatttatatagcttcataagagtatactccgaagtacatgccgttttatgtatttttatgccttcatattctgattgtctaatggctctaaaacaacagacgtaaactacgatgtctgaagttttccatgttttcttccttatgaaaatgatatggagctgtggcaagctgctttggcaatccctgttgctgtccagagtaaagattttcatgtggcttgcgctaaagggcagatgcctcatggctgacaatctacagaaaagaggtggcctcatcaggcgaattgttccctatgcaacctgacatttcaagatgacaccncaaccttttgttcaatgtgctttcacaaacaggatttggagattgctc

SEQ ID NO: 77303 - DNA, 392 bp, Oryza sativa
agcttaagaggctatcaggtgggtccaggtcttggcaaactatgctagggtgagagggttgggtaaaattctgggtaaacttgatttttacatcatttttttttcggaattattttctcctctaactttgtagcttcataacttaatgtgtagatcagaagaattagtgtagattttactggtggtagatgattacacctagattccattttctttggttgcactcaaaaataatgggtggactgctcacagaaattaaacaaagatgggctattagaaagctagattgaatttttaggaggcttaaacagaggaggaaaaatctagaaaaatacatttattcatgaaaactaatctagtatttgaataaattatttcccatgctcacttat

SEQ ID NO: 77304 - DNA, 431 bp, Oryza sativa
  unsure (1)..(431): unsure at all n locations
nttcggccatggaaaactgcgcagcaaatgggaaggactgtttgacgtcatcgacacctcttcgcacggggcaatcacactccgcgacgaattaggtaacatatttaaggtaaacggtcaacgcctaaagattttccttgagccaaatgaaactttagatgaagaagtggatgttattgaattaattgattatgaaccatgttgatctcatctattgcatgcttaaaaccctgtatagntgtcatttttgtgattaaaataggttttagtgggcctaggaaaaatttggtggcctgccggacccaccagggttcggccgatctagggcggcgcccgatcggccccaattttgaaccttagtctcccccgctcgtccctagtcttgttagatgcgcgtttggaggtagaacgttcggatcacaccagaacac

SEQ ID NO: 77305 - DNA, 427 bp, Oryza sativa
  unsure (1)..(427): unsure at all n locations
agctngaggttgaggggttgatcgaccgactaccatcactattatgatacatatactaacaaatgcaaattgcatcatttgcaatggaaaataaaggctacacttacgacttaattgttcatcaagagtgaaacgctcacgactccaatcacaagatgcacccaatcgcttaatctgattagtgatagtgctcccgtacctggaaaggaaacatcatttggagtgattgctagaatttataaaatatgtaaccttcttgaatcatgattttttttatcaactagaatatttattattccatcccaagttcatgatagtttaactggcaattcagaataataacaaaaggctggtcatctagatgatcaaattattatgacaggtaccacccaacacgataatgataccagaagatagttaataaact

SEQ ID NO: 77306 - DNA, 434 bp, Oryza sativa
  unsure (1)..(434): unsure at all n locations
tcaccgtctcagcagagcatcctacaagggtttccagaacggaaaatgaggacatgaaagtatgaaacaacacacacgctattcttgtgagttgtgcctatttaaaaaaggaaaaaaaaacacctatacggttggagggtccacggatgttgaactctttgaagaaacccaagtacgtggctttcttgtgtgtccggctgatggaacccaaaaagttagtttgtatcttcacagagtgttgataaaggagtaacaccaacgtttgtctttgatcttctgctttcttgaattcagtcttcgtcctttactaaatagcactccattctacattcaggggtagttattcctgcnaaaataaagagagagagagagagagagagntaatgataaccatattaatatagcactccattctacattcaggggtagttatt

SEQ ID NO: 77307 - DNA, 347 bp, Oryza sativa
  unsure (1)..(347): unsure at all n locations
tgcccaanattacttataccatgcatctagtgacaaacaactcttgacagaaacggaaattaattaatcaaccgaacctgatttaagcatggatcgagaggcatcatagggtttaatttcatccatctctggctgcgaaaattaagcatttataacctgattgatcgaactaggagaagaatctaaaaccctacgtacgcacgcgcacgccattgatggctacagcctcagggacaagttcaatggcacggcgccgcagccaccaccggccgacgaagagaacggcgccgcggcgaactccgactcgtcggcgtgggtggtgctcgtcgggaagaactcgatctccc

SEQ ID NO: 77308 - DNA, 401 bp, Oryza sativa
  unsure (1)..(401): unsure at all n locations
agcttagccggatagtccgacatgcattgttggacagtctggctcaacgtttgtttggctgtcactgtgtaagttcaagtgccttaatttggttttggtgattaatgacaaatctagttatatgagattaacatttttatgagcttttgtttgactagtctcatttggatatgaaagtaaaaaatgattagaggtatgtattaaacttcacatattctaacttggtctctcttgtggatccaaaatatagtgtgagctccctcattgatcttgattgattatgtgcgtatgtgttcctttatatccatatgtatgcacatcttgagggggaggttattctatattttgtttattataagaattctatcttgattngaaacatcnttcatctcatctctcta

SEQ ID NO: 77309 - DNA, 428 bp, Oryza sativa
  unsure (1)..(428): unsure at all n locations
tcttgattggtccaatggttttctattctcataaatgagttctgatagatccgaggagttcttgagctatcaggctggatgaaatcaaactatggtttacttactagagaggaaacaagaagggatatggtaggggatctcaccagatatagggccttcgcggcgaagtgcagcggcagaggttcgtagacgtcgccggctcgccggaggggaagcacaagcgcccccctttctcactgtcacagtggcacagtcccacttctccgagggtaaagaggaggacaatttgggccgaaaccgtaccgggctcaattctatggcccaactgataattgcaccctaaattnttattttcattttgttggaatacaggattagagatgagtgtgaccttgaccccgggtacacttncacagtgaactactccc

SEQ ID NO: 77310 - DNA, 373 bp, Oryza sativa
  unsure (1)..(373): unsure at all n locations
agctngcatactcgatcgacagaaaacaaatgttaattttatttttaagagaaaactataaacgtagacgctcgtaacgcacacacagtcacctgaaccgatatattttaatattaataaagtcaccagtacacgtgtgtctcggtctcgctatcaacgaatacctcatatgtatatcgcttaaaaataattagccgtaaatacgattacaccgtgtctaatctagagatccaattttagtgggttggttcagctaaaaaaaattctagccagttaagctagctcgcttgtgaaaaaagttaattaattagtgtgtggtgattagtgaaatcaattggcgaattggttcgttgttctgcgagtgttccttgca

SEQ ID NO: 77311 - DNA, 332 bp, Oryza sativa
  unsure (1)..(332): unsure at all n locations
tacgagctgaaagctgaaagtctagcttgacctgattcatttagaccacgagtctgttctgaaccacgaacttcaagctctccgtcgtccacctcttgtttaaacttctatttactgaatccatctcataaatagatgtgagcatatattacctgcttgaaactntaaattcaccacatacgtaaaaaaaagattttgctaaaaatacggcacatattttttttagataatccaagaaatgccattgacaagcgtgcaagatctagaaatgccattgacatgtgaggttctaaaaataccatcatacaaacaattcattcccaaaaagtcat

SEQ ID NO: 77312 - DNA, 385 bp, Oryza sativa
  unsure (1)..(385): unsure at all n locations
catgctagcctgatataagcttntaagaaatcacagacttggctagaattatcatgcacagcataaattcaccagtattgtacacgttatgcctccatttgctacatttatgctcagtcagaatcaagcctttcatcatcagagttattactactcggctgaagatcggtgttgcggaattgatctacgacgtcacttgcaaacttgtcagccgcattttgagcattgctgataagaacaagagcagtctttacgcttgtcctgtctgcaaagccatcaatggcgttaatttctatccttcggtacaaggatttgggcaatcgcaatgccgtgctagcttccatactttcagcttgtttgatattcttgaaattacatacggagc

SEQ ID NO: 77313 - DNA, 452 bp, Oryza sativa
actcaagcttggtgcactcttcactcaaagccagataagctgaccagatgatgcagacttctcttctccactgaccaaaaaccgccaatccagcttttcttctgcctgcactcacacacatctcacttgtggtggctggctttcgcaagaacccaaaaaaagatgcaagcaggcagcgagagctcctctcctctctgactcttcttctcgctgctcccaatgccgatgcagcgaaacgccatgaatttttctggaccaaaataaaaagaacacaccccacattcagagaaagaaagagagagagagagagagtaggagtagtatgtgagagctccaatgaatgtgtcacagatgtccatcagagtatcagacccaagaacaaagacaaaaggattaaaaaaaatagagtagccatagtaaaaagaggatccaatgcaatgcaatgtgatgtg

SEQ ID NO: 77314 - DNA, 290 bp, Oryza sativa
ctgtattttattaacttgggcttctcgccaacagacttcattggactcaaactccatcctaaagaacccgagactgagttcttgtcacatgctaaaccacccctttttgaggattcccaaaccgccaacgcaacagaatactacatttatctgttaaactgccgacagccattttgttacatatctcccggcgaaatctttggcctagacgatgctgaaaacacagctaaccaagagaaagtaaccgtacgtgcttttgtgtttaattcaaccagggcaaccaacttaag

SEQ ID NO: 77315 - DNA, 418 bp, Oryza sativa
  unsure (1)..(418): unsure at all n locations
tatcaatactaagctatagcgaanatacgacacactactttggagcggacctgacatggtgaaatttacaaatagctagtattagcgctgcaccacgtacaggataatctggaacagaatgttaattattggatggatgggcgaaataataaaccctatctcaatacaatcccagatggatatcaaagatctacagctacgatgatcactgacgggattatgcgaactgtcgtctacaatatagcaacatctaacgactggccttcctctcgaattgtaacacagatgggactggcctctggtgcattcgacagtgatatacgactcacgcctgtctggcggtggacaatccanaaccgctcaccgataagatgggaatccatatccaaccgaaccatatctgctcaaacgggacaaa

SEQ ID NO: 77316 - DNA, 384 bp, Oryza sativa
  unsure (1)..(384): unsure at all n locations
agcttgcaggttggatgatacagtagcttttctattcttgttactacgtaatattgtattggtgcaattaaaaacggttatgtgcttcttttttctgatgcagtgcaacattgctgccttccatgaaatgatttcttccaaaagaatggaatgataatgtcatcattcagcgggctgcattttttccactgtatgtctgtaggacccaaacttctttttttttaaaatgctcaatcatcggtgcaattgtgtatcatatgtcagattgttgctgcaattatgaatcattgtacaagctatcttgtgggccttttntaagtcattaatttcttatttcaacgctcttagtggagtttaccaaggctcaagttggtacatcgatcc

SEQ ID NO: 77317 - DNA, 434 bp, Oryza sativa
  unsure (1)..(434): unsure at all n locations
tatacaagnactcaagctgcatagggtacgtgcactgtgcttgcaccattcttctataaaaatggtgtcattagatttgcaatcttgcaatgaaaaatccaactaatcacagctacttttaacagtttctaaaatgtgtccaaattttgagcactcgcaaagtcccaagtcacatttgcactcagtgcactaaggttgtgtttagattcacgccacacttaaaagtttgactaaaattggaagtttgaaaaaaaaacggtcgaagtttacttgtgtaggaaagttttgatgtgatgaaaaagatgaaagtttgaaggaaaagttgggaactaaactcagccttaacaaaaagtcagaacagcaacaataacggctgacttcaggttaagtttacacaatgggtcttgagagtggataagggttctggacttctg

SEQ ID NO: 77318 - DNA, 380 bp, Oryza sativa
  unsure (1)..(380): unsure at all n locations
agcttctaacatgggtaggtaaagccaattcattaggtcttaaatacatacgcaacatgatttcctaaccttctgctttaacttcagccaagtcagcacggaaatgtgaagacttgaaatcatgttccaatcagctgtggaatttgcttcctgccttctgccgctacccagttgatatatgtcagaatttcggctctctatccaagntgctactagagatgttgaaatgtgacaagtatctgtacaaatccgctgttaaagccctgcaggtgcagttntcatttacagatatactgcatttttcttatcttatctatactcaatttctttctggaatatctaactacaaggctgctccatgtcttctctcagacaacatg

SEQ ID NO: 77319 - DNA, 417 bp, Oryza sativa
  unsure (1)..(417): unsure at all n locations
caaactaagcttaggcccagctcacctcattngggtaatgtccatatattatgattatatnatatgaatgaattatcaaaagaatagagagagagagatagactgaaaaaataaaggagaattggaggagtcaaggtcatggatcatgacaccgtcttagattgttgtatgctcgacctcagcgaatgagccagcaaatgatgaattccgctttagttttatgtcgctatttagcttggaaagagtaaacaacagcggcaagtggaaaggagaaaagcgttgagagcaatgcaaagcctatcttaagcttatgatgacacctcccccccctttttttttttttttgcaatgggcatcttttaacttagcttctgctggtttggggcacttgtcgtaacaggcacaattgaccgatgc

SEQ ID NO: 77320 - DNA, 373 bp, Oryza sativa
  unsure (1)..(373): unsure at all n locations
atgcaagcttcttagcactcggccagtgagcgtgatggcagaaaagtggaacatagaatgtgtccggagaatcaacacgattgcaccagaaccaaaaacttctgaagtgcatttgtaatttgagcaagcggaagatcccaaggataaacttatggcccacagcactgggattaaagttaacctgtttttttttaattcactgactcattntattcgcttaatgtggttaattgtaccttcttataatcatcttgcctgatgaattctctcttgttttttatgtcccacagaaatctctagctcaagagtgcttgacttttctcaacagtgctaataagtgagtttggcattattcttacaaccgactttacac

SEQ ID NO: 77321 - DNA, 421 bp, Oryza sativa
  unsure (1)..(421): unsure at all n locations
tcatttgaagctntacacatcagaaattaaaacgcatcatgcacctagaaaaatcctagcaattacttatgcatgttngctcgaggttggaacacatgcagaactccatgaaggaatgaaaaatgcatatctcctcccaattcccatgatcacattcagaagcattaaaaaatgcaaagttctaatatcaaccaggacaggtgactttcagctcggtggatgaaagacaaacagcgttcaaaaacttacaattgaagcatacgacttcttgggggcctcctcttgtggtacaggggcaggggcaggggcaggcggagtcggcatagccacagctacgttatttggcacttcatctataacttcaggaatcggcgtttcctccacaacaggcccctctgtgttgttcggtgggttataaacc

SEQ ID NO: 77322 - DNA, 427 bp, Oryza sativa
agcttaacgtcatactaacgtgaactactaactagaggcaaagtggtcctaccacaaaaaccacttctacaactaaacctggtttccgacaaaactttataaagactccaaagcagcactgatgtagaacatccttccatggctgacggtagagattaaaacagataataagatattccgaaaggaggaagacaagaaagagcaaggaaaggaagaacacattatattcgtttgcgtttcttgaaaacaggtttgaaataagaccaggctaactaaggttgcggcctacaagccacgcagctctgataccaactctgtgaggacccaaaatatgacctcctgtgataagtgctaatccaggatcaagctagcacacacagactcagagataatatcacagccaacatcatgaacgaattcctatatt

SEQ ID NO: 77323 - DNA, 422 bp, Oryza sativa
  unsure (1)..(422): unsure at all n locations
taagataccaatgcgagttcatactcctggatgtggcatttccacaactcactactgcccatctgtgacagttgaaattcaagggttgatttttccagccaacctcattcttctcgaatccaaggacctagatgtcatacttggaatggattggttgacaaggcacagaggagtgattgattgcgccagccgcaccatcaagttgaccaatgcaaaagaagaggtggtaaccttccagtctccagtgccgcagaagccagggattagtttaaaccaggctgctggtgaagaacaagaggtagcagtggagaaaaccactaagaagctggaggatattcccatagtcagagagtatccagaggttnttccggacgatctgacaacaatgccaccaaaaagggatatcgagttccggattgact

SEQ ID NO: 77324 - DNA, 422 bp, Oryza sativa
agctttatggtacttcacatttgtccatttaccaacattccctaactttcttaaaacaccttctctattgaaactttatgctcttgaatgttctttcaaaaagaacacttgccagacatgtgttgaccccctttctctttctctgtctgcatatatgatataaccaagacctagcactattcgaccaaagagctggccatgaagatcactataattggactgtttcagttgctgcttatggtgtgcagtgcagtccaaatcatttgcagttcgttgtatggaaacgagacagataagctctcactgcttgagttcaagaaggcaatcactcttgatccccagcaagtcctgatttcttggaatgacagccatcacttttgcagctgggaaggagtcttgtgcagaaagaagacaaccaatcg

SEQ ID NO: 77325 - DNA, 415 bp, Oryza sativa
  unsure (1)..(415): unsure at all n locations
tagtttctgcaatgtcttcagacctcctagccattgtggtacagatcctgaaaatcggntgtaatctagtccaagaattatcaagttgggaagatttgcaatgcctgaaggaaaactccctgacaattgattctgtcccaagaaaagatactgtagctgaactgaaaaattgcctaatgaacctggtacctctccttccatttgattcctcgctatagagattccttgtagctgagtacaattggctacgctatccatgaactcccagtcttgcttgctacgagcatggagctggttcatctcaagatttaaccttgtaagattggcaagcttgccaatggaggcaggtacaaccccagtaaagttattttcagatatatcaatcttgaccagantggaagcattcgccaacgaa

SEQ ID NO: 77326 - DNA, 366 bp, Oryza sativa
  unsure (1)..(366): unsure at all n locations
agcttcagncaaatattgtattcattattctttatttaaaggagtcagtttgatgtctagaactctagatatacccagtagacaggattttgaacatttctagtggatgtaaaaatagcaagcttcaaaattcttgtgccagaacaaagggagtagccaagtttagtccttgtttgtataggctatcaatctttatcaagttcaaattgtgatttctgtataagcagaaaaattggtatcatatgccattgttataggaaccacacttcactgtccttagaactttcagttctatatcaactcaggtgctttttttcaaaaagtagaatggccatgtggaattgggattatgttgcggctaatgat

SEQ ID NO: 77327 - DNA, 407 bp, Oryza sativa
tctagggttcttggtctctgcccaggcattgattcctatcccgagaagatacgggctatagagcggatgcacccccccaggaaacttatggatgtgcaatgcgtcaccggttgcatggccgccctaagtcggttcatatcgaggctgggagagaaggcgttacccttatttaagcttctcaaacgctccggaccgtttacctggacgaaggaagccgaaaatgccctcacccagttgaaggcgtatctaagctctcccccagttctggtcgccccggagccagacgagcccttgttactctacttagcggcgaccccgcaagtagttagtgcggcattggttgtggagcgcgatgagaacaattctcatttcatgcttccctaccctgtgccgactttggccgggag

SEQ ID NO: 77328 - DNA, 382 bp, Oryza sativa
agcttgcttgagaggggtatcgatccggcctccgctaagtggcctgatcgatcgaagttctggtactatgctcacggtggaacgctcagcccaattgatggctccttggtcttcagcgatcagatacgcgaggctgtgaatcgactaacggacgcagtggaagcctcttctcaggacacgttccgacccgacagagagaaggacgagctatcactcgccctacagactcctgagcatccaggacgaacacgagggaaaggcgtgattccctggaagatgggattcaaggaggacatccacacgtataggagtcggatgaggagcaagagagataccgaggcgaagattgcagatcttgagtacagggtatcgagctacgagc

SEQ ID NO: 77329 - DNA, 431 bp, Oryza sativa
  unsure (1)..(431): unsure at all n locations
tccttgcactagaaacactgttgccatgctcccagcatcttatctgtgtcgccaatgtccctgctactggatctatcgttgncaagatcctcgccaatcgatccgcccttccctaggccggcgctagcgttgctgccactcactccaatgctgaaggcagatccaccctacgacaattgcgagccttctacagctgatctcgagcccgccgcgcgaggataattgtgagacaaagagagggagggaagaggataagagacaagaggtaatggggggtaaaggagaggataggggaggtgtggaggagataagtctcatgggattggtattcatagtttgttacgaatttgacaagggtggccatttttaattccaaggcattccaaggcagaccttgcttgaaaaatcagatttttacatatgcacgtctc

SEQ ID NO: 77330 - DNA, 429 bp, Oryza sativa
agcttatttccagttttcactgaatgaagctcttgctttggccttatatatgaacttgtctgttcagtgcattcatgaaactttgtgattcattagtgacttactgatacatatgtgacgatgtgcgctggatatgaaggttcattccaagcactagtcatatgtaaaaaaaaggtgcaatatgcacctgataattgtagtgctgtgtatgtacatttaatctaacatagttagtagttcattagagtaattagagtggttcatgatattagttcattagttactctaaacatagatatatgatgtgatctttcttgtgatttctgttgtgttacacagttacggcatagattttcctgctataactccaacaggtcacgatgatgccttccccgatcctcacaagttcgtcttcaatcacctaaagta

SEQ ID NO: 77331 - DNA, 289 bp, Oryza sativa
  unsure (1)..(289): unsure at all n locations
tgatgaatctatctataataaaggttctatgcaatgngatttattatgaatgtggacttacctttgcatccgttgtgtactcggcaattgtcgagtatttgggcacattgccagtgatttgttgctatgagttcaacacaaaagtcatttctattggaatgtcagcctagcatttagtttgagtgagataatgaatgtaattcatcacttgattcttgatgagttgtttggtttgaggaatgggataggataaactcattccacctcaatgctcatcgtacatgatatt

SEQ ID NO: 77332 - DNA, 389 bp, Oryza sativa
  unsure (1)..(389): unsure at all n locations
acacatgctaaagccttcttactatataagatcagcttaaaattattgcgcaagcagattatctgagaaaaaagattgtgcacacaggagatgagctataacaacatggcaaggagtggagtacatcttgtcaaagaccatcgaaatggctgtgtgctggctaagctggcttacaattntcggtgaaaaatatataaacaggagaatctttgagtcaagctggagcgttcgtccctgtcaaactccttaaaggagacaacatctaccccgcatggcctgatacccttcctttccccctaatttaagttaatttaatggggggagttagtgaaggatcacattataaattatgcattacgcattgcatgtcgcgtaatattttatcacta

SEQ ID NO: 77333 - DNA, 438 bp, Oryza sativa
  unsure (1)..(438): unsure at all n locations
gcaagcnttggtagcaacctaaaccagccatttctaatttcttgtctaaganaacaacacaaagggaacttgaataaccttgccgttgcacgggctgtgcattgactacttttttcatatggcgaccaaaccaaaaaaccaaacaaaattaacccaaactggcacagctccaccgtcctgtcgaagaaggggcaggcatgcgtgcgtggagaaagctacacacgcatggggctgcgctgtactgagccaaattttatggttaagttgtcaacttgttgtttgtacccatatcgcctaacctcccatgacgacgttgattcctcgcttcatcctactccctccgtcccaaaaataaaaaaacaaaccctggttttcgtgtacaacggttgaccgttcatcttattttaaaaaaatattataaaaattaaaaagataagt

SEQ ID NO: 77334 - DNA, 436 bp, Oryza sativa
  unsure (1)..(436): unsure at all n locations
gactatcngcgtaaaatnttcatgtcatttctgtgctttaagcccgtaaatacttatcatatattctatcaattagacgtgtacatcaaatggcctcaggtatcagctcatgattaattgaatatcgtgtttctgacatccatatcacttagagttgaatctcttgaaaataaaaatgaagataaagataaagattaagtgttttatgtaaaacgacgtgggaaataacgcataattaattgagttgtaattattaataacttgaaaaatgttataacgaaagtttttatacgaaacacaccgtttagcagtttgaaaaacgtgccatttttatccaggttatctagtgttttacactctgatatttngattgtctactcactcatatgccatgactttttgcatgacacgctaatttgacatttacctgatgggg

SEQ ID NO: 77335 - DNA, 436 bp, Oryza sativa
  unsure (1)..(436): unsure at all n locations
agcttgtgaccataaacaaagcactgtggggaggtaacccggattgctatggtaagtttcccttctaataaaagcaagaaccaatttttaggataatatgcaccttcgggtattcttggtcgctaaacattgcaagttgagattaagaacgagagtcatcagatgcctaagaacacggtagctacatcaattacacactttggtgatccttggtattggaacaaactctataggagactccaacattacacactnggtttttgatgtcttgtgacacacaagtccaagtgtgggggtgaatgtcgatgagcttgtcataacgagttccatcaaccaaggccaccttggtttgaagttgggggtaagcctagcttggtaaaaaaagaaaaaaaagaaaaaaaaagaggagaaatgagagcccggacgagataaaaaa

SEQ ID NO: 77336 - DNA, 463 bp, Oryza sativa
tacgtgacactatgaaactaagcttgttagcaaccaagcccaactagaaaagaaaatagtcgtttatatgaacttgtactttatacgaacagaaattagttaggttaagtagtgaactcaccagtttctgatagacgacggcatcacttttgttctcaaatgtgacagagccgtccaggttgaccttaccccttgcccacgcccagttgcgagctttttgttcagggatgtatgaaaacggggcagggacattcgctgctgcagcggttgcatcttcatgggcccatattgcctccttgccgatgtaccctgcggtgcccagccgatgcgggtgctcattccgctgttgcagtaggcgatgtgcctcgcttgattccctaaactcttgggtgttcttgagagagcagaattcctcccacaccgcttcgattatttgagggtattcattgaacggcgtatgatt

SEQ ID NO: 77337 - DNA, 418 bp, Oryza sativa
  unsure (1)..(418): unsure at all n locations
aactttctttctgtgtgggtcttctactgcggctttataagaagaactaccgcatatatgtgactcgtaccaccggatatgagagatcaccancatcgtgtgattgcatatctacattgggtgcaagatacgcctctccatattggtcacaagttcatcactggtttgcactcctgtagacctgacatgtgttgttagttgacataaattttttaattgactgggcttgattcatctgcataagcagtggtgattcttaatgtccacatttgtctgaatatgcagagctgtcattgtgtgggccacatgggatctcattgcactagttgaaaacggaagacatgattgtactcccacacatttactatgctcttgttcgaacaagggtcgggaggtacatttttgctaatgcggaatg

SEQ ID NO: 77338 - DNA, 419 bp, Oryza sativa
  unsure (1)..(419): unsure at all n locations
tttcgataacctcgcattggcagtacccgctccatgaactattcatcctcatgcactctatgcgtacacggattctagcagtgagaggagttctggcgcacccgggaagggaagactcacacatgcattaaattataggtatgttntagattctctcatggcagtcctaccgatggcgacaccactgtagacacccgcctcgcggtcctaccaatggctgccccacccgagagcccctgcctcacacatcaagaaaccactatgcatggatactgcctccgctcagctatctactccgctaggtctatacccatacgagaagtgcggntgtacgggggtccgttcatgcttaacttcatggctccggccttaattgaccagggacagcactagcattttccggacaccacccaagttct

SEQ ID NO: 77339 - DNA, 380 bp, Oryza sativa
  unsure (1)..(380): unsure at all n locations
tttggaagaaaatcatggtatgtaatatatgtaatatggctgccatgtactccatttatgtaagaacttgttggatggatgtaatagtaactaagaactcgtttgtccttaatttagaaacctctgtgcttgctgtccagaactttggaaaatctgtaaacataagttcatctaagttagaaatctggttataagctcctgttaatatgaaccaacatttatcttgttggaactaacttctctagtgtcaatttaactaactatctaagcttccataaacccacaactgagtagaacttgccactcacccgcgaaataaaaagttccaaatgttntatggtaacaagtcttgtcatacaacttaaaagaaatttatatct

SEQ ID NO: 77340 - DNA, 433 bp, Oryza sativa
  unsure (1)..(433): unsure at all n locations
tggagtcacaacaacacatgtggnngatgatggtgttntggtgtttcttacagntatcatgagaaatgaaagctgtgaatttgcacttaaaaataggctgaaattgaatttatttaatgaaaatatctaaacaatgttcccatatgaacttaatctttggccaaaatcagctcactttaagagccatttttcatattgtattatgtacagtatgtaaaccacatattgtccccataaaccaaatctgtttctgtattgcgacactacggattacggaatgctctccaatttgtcctttactttcattaacctgttttagctgctcttataaccattcacagcttcacaagtttgtgaatgatgacttgcggtgcattctttgcagagatatcaagtattaagtaagcaaagacttgatcgtgctattcttatc

SEQ ID NO: 77341 - DNA, 355 bp, Oryza sativa
gcttaacattgcggccgatctgagtcgagaaatatctctgaatcatgcgttgatagggtgctcctgcgttcttcaatccaaagggcatggtgatgtatcaataggccccgaagggtgtaataaacgaggacttcaagcagtcggattctttcagtcgaatctgatgatatcccgagtagcagtccaagaaactgagtaactcgcagcctgccgttgagtcaaccacctagtcaatgcgaggtaacccaaaagggtctttggggcaagacttgttgaggtcggtgtaatcaacacacatgcgccattgccccgtctttttccgaaccaagactgggttagccagccagtctggatg

SEQ ID NO: 77342 - DNA, 427 bp, Oryza sativa
  unsure (1)..(427): unsure at all n locations
tagtcacctttgtgcaggtcatatcatttcgtacatattgttaatatttacattgctcttgcctatcatgagagggacatgaatcactatattaattagttgctattgcttgaaagtggaacaacagtaatgtaacaactaagattttcttattgttatttttttgacagtctgctgaaaataagagttagacaaggacagtggtacaattaattactaacaaaatgttacagtcatgatgtcattctgcaaatatgaaaaaaactatctcttgttctctgcatgttaggtagcacccgtgatgcaatgacaaagattcatataagcttccaatccatatcgagcctaccatatcttcaagcttttatcataccagagtggcttggtgggtgcactataggntataatatctttttaatcctttctc

SEQ ID NO: 77343 - DNA, 418 bp, Oryza sativa
  unsure (1)..(418): unsure at all n locations
agcttgaaatgatatctttgncaatatcatgagccctagaaaatattcaataacaatctcggttttaggttaattcgtggcatttggttttgatcagatcatgaaatcactacatattaatggaagagcctgatgctgacaatacgccatgtaagaaagaacaaggttactaatatattgtagtattgtactacggagagtgcctaaatcattgttgatcactttgatatagcttgaagccttgaagtgtgttgattcaaaacagttaggaacaattattacattagtttacagactacaaattctccttaatttaggcaagataataaacacatggtctacaaaaattttgatagtgtttntaagaaattgtagtacttcaaattttgtaagcatgccaaacatatactctttcccc

SEQ ID NO: 77344 - DNA, 434 bp, Oryza sativa
tcacgattgtgaagaacgtcaccgagtggataagacgtgaccatagtgaccaagtgactttgaaaataatgtgcttgcttcctgaccgtgatcagcactccatacaataacttctagacttgtggataccacattttgcggtcggccaaaacttcaccgatgaaataaataggcctttgagctttttgaatgtctcgctcctattctcgccaatgcataaagtagcaaaggctcctatggatgaggtgaagccagcacgagaaatatattgtgaggaaactattgaaatctaaaatcttcaaaagctcgttgggtttcgggcgtccattagaaatcgtttgtcttctttagcaacttgaagaagggcatgcctcgttctccaccttggaaataaatcaactgagaaccgccaagcactcggtgatgttttgaca

SEQ ID NO: 77345 - DNA, 387 bp, Oryza sativa
  unsure (1)..(387): unsure at all n locations
agctatgatagttntcctcaagttcaaatctttagttgcatacatacaagttgctttggtgaaactaaccagcgggtgaaactcttgttcttgctccattgtgcagtatgaagcgactgtcttgtctgttcaaggggtcaggctctccatcaagtcgtcatgacgagactagtactcgttcatcagctgatgtctccatggaagacgccgacgcttccggacaactcctgagcgacgctgacctcgaccttgtcagggatcgggagagacaagcctactacatgctgagcgaacgggagtatgctcacacgctagaatactcaccagagttgctgaaaaagataagaatggatgttgaatttcttctatttgaaagctgttggtggc

SEQ ID NO: 77346 - DNA, 433 bp, Oryza sativa
gtgtggggtcggcgtcatcaatctgcacttttgttatcttgccatgaggggtgggctttggcgtgtgcttcggccgttcatgtggtttggtctcaaaactgtgcactgctctgttgattatggctagatcgccttttgaagcggccgaaggctgaagccccttgactactatcacccctgtcgggccgagcatcttgagcttgagataattgtggtgggaaatggcttcgaacttgttcagggttgcacggttgaagatggcgttgtagttgtacaggatgtcgacgatgtcgaacagtatttcctcttcgcgtctgttctcccccgggccaaaggctatcagcaaaagtgcttggccgagaacttgaactgcttctccgccgaaaccgcggagcgatgctggtgctggggtaagggcttgggtaggcaaccc

SEQ ID NO: 77347 - DNA, 415 bp, Oryza sativa
  unsure (1)..(415): unsure at all n locations
agcttggagctatcaaaaaccctaatgagtgaacgttcagtcacatgtgctcggagtgccaattggttgtcctctctttttgacgcacctaaacacctttcctggtatttatttatgcatggaatagatggatgttcgagttcaatccagaggttttcaatctataaactttacataaacttccaatgtataaatgtaatacattgaggaacttttgatttataaactttntttgtacatatgaactttcagtctataagctttatacataaaaagaacttgtcaatatagaaagttgtgcacatganatttcnaatgaacctaaaaacgccaaaactttctattcaaaatcattaactntcaacaatctttggaattgtttgctcaaaaatagatttttttttccacccgatat

SEQ ID NO: 77348 - DNA, 374 bp, Oryza sativa
  unsure (1)..(374): unsure at all n locations
tgagcttgaactgacgattgatttctggcatacttcgtcttctttattctcgntgaagcagcggatggaggcgattgatttctggagctgttcatccggcgaagttaaagtcggtagctcgatgaactgcagctgacacgcctgcgtgcacaattgccgatctcccctttgcagttgtgcttccaactttgcatgcatgcgtgcacgctgcacacacgcatgcatcgatgatccaaccacatgctgtttagtgttactttctccgtttcatattataagaatttctaacattacccatatttatatatattgttaatgaaattagacatatatnattatctagatttttaacatctattgaattttgacaatac

SEQ ID NO: 77349 - DNA, 384 bp, Oryza sativa
  unsure (1)..(384): unsure at all n locations
agctttcaccactgtcaacttggctaacaacgcgtacaaggatgaaccggtcgttctcgccaaacaagttggtcaagtgttctacatagttgacccgtgtaacaagaaactacatgttgttcgtgaagggaaaaagagaattgttggattggacaatattgcagacgaggatgattacaaccagcacgtccatggcataggtcaagaaatacctctanaagaggaggaggaagaagatgaagttcaatatgcacgtgtcgaccatgaggaaggattattnttgtaatttatgtacgtagtttatgtctacatggctggtatctggatgaatctaatatgttcggaatgatcaatagtatattgcttatgaaatagtcaaaataa

SEQ ID NO: 77350 - DNA, 395 bp, Oryza sativa
  unsure (1)..(395): unsure at all n locations
tgaatatataggananatataatcataagatagagaactgttcttttcagttntcatcattccttntacttagtagtgtggcacaaagtgaagctttgacagttactgaatgtgttagacgatgaatctcattaatgctttgtactttgttttgatcttgtgatgacagtctgatgatgcatgtaagctggagtgcatctgtgatgggccaccagattggagagaaacggacatttcgatgaggtatctgaggaaagtagagatcctcaacttcagaggggaggaacatgagcttgacctcctgagggtcttagtcaaggtagcaccagcactgaggatgatcagaataatcttgcaccgttcgtgcgctgcttgggagacactatctgcacata

SEQ ID NO: 77351 - DNA, 165 bp, Oryza sativa
taactagcttgttgatctcacgtgaagaaactatagaaaatgatacctttctaaatcccattattaattactcacatcccacataaacttgatacacatacctcatttatagtaacatagtagcatacatctcccaaaataaacttgcagtagcttagtactcac

SEQ ID NO: 77352 - DNA, 416 bp, Oryza sativa
ggttgaaaatcttatgagctgtaagcatctggtcaacatattgttttctttcccctagccagctaatcgagtgtgttgtagatctgcaatgattctgaggggaaaaaaagatattagttggatacaaaaaaattaacttgatgaacataagcagcagattttctttaatcatacaagtgatttctttttttattattttagttgacagtatctccttttgtggtcctaggctggcgatacaatgtttcctctccagatgatgatggtgaaaaaaaaagtatatcccgacaatagtcctgtaggtttcaatagaagctgtgtttccatcggctccgctctgtattgtggctgcagcatcacaatctttgctgtttatcatgtactttctacacactttcttaccggcattcactcct

SEQ ID NO: 77353 - DNA, 431 bp, Oryza sativa
  unsure (1)..(431): unsure at all n locations
agcttaaacttgtcatanaacgtgtaagtctgttctactgtacctttgacatttgtgctctccgtgccatgcagttttcgtaaacccacaccattttccttttttattttttaccttttgttctatctgctatgccatgtttntgttaattcagaaatcatttgtgcagggccaaagacaatctacaactctttcccttgtgctctgttccacgatcacctgttctcaatattgtttattttcactggggttttccttgtgaattatgtcctgatgggctcagcagcagttgaatccaataatactctggntacttttcaagattctgtagatttaatgaaccaggtttttgcctccagtttgcattctgcttgtttgagtatgaattctgcaccatagttccttcatgagttcctctgaatgccttctgc

SEQ ID NO: 77354 - DNA, 170 bp, Oryza sativa
aattgagtacttgagaagtccactgaaaatggaaaatagagcatagtatatcacgtgctctatataaacattctacatcagcagctatcaccgaaaaaatatatgcaagccaatctgatatcacatcatcacgcatcgtaatcgtacgcttaccacatatctcaatacat

SEQ ID NO: 77355 - DNA, 406 bp, Oryza sativa
  unsure (1)..(406): unsure at all n locations
agcttatgcatgtggtagcccccggccaaccctgctcgcccggnggggtgcggtgttggcccgagcccgagacctgacactcgacccccactaggggtagaagcgacgaaggtgttcgatgttccacgggttaggcagctctgtgccgtcgcccgtggccagccgaacggagcccggccgggggacgccgatcactcgatacggaccctctcacattggtgagagcttgctcagtccagcacgcgtttggacgcggcgtatgacgaggtcgtcgacgcagagcgatcgggcccggacgtggcgctgatggtagcgccgcacgctctgctggtagcgcgcggcttggatggccacgcgccgtcttctctctttcaagtagtcgaggtcatctctgcgaaactgatct

SEQ ID NO: 77356 - DNA, 273 bp, Oryza sativa
  unsure (1)..(273): unsure at all n locations
gccgattcatggagacgccacatgacaatcatctgatggcggtgaagcacatcctgcagtatgtagcaggtactctgaattttggatgctgctttgcaaactcatgggaaacgggaatacatttgctgggtttttcagacagtgactttgggggagacgttgatgatcggaagagcacctcangggctttattctttctcggctccagtccaattgcatggcaatctcagaaacaaaaggtggtagcccttttctcttgtgaagcagaataca

SEQ ID NO: 77357 - DNA, 169 bp, Oryza sativa
  unsure (1)..(169): unsure at all n locations
acaaaaaggggaattcgtagtcactttttcctgtcgcgtaaaaaaaaggctttacgcgagagcaatagagggtgggatacatctatctcttctgagcaacctcttttggattcttaagaccacccttgcagtangataccgtctgctgtgggttctntattatattatc

SEQ ID NO: 77358 - DNA, 460 bp, Oryza sativa
  unsure (1)..(460): unsure at all n locations
ttaagtcacctgctgcatgcaagtctttggaggcatgcattactgctacagggatggtataatgagatcgcatcattctttatcatgaaatttgaagactactgactacagaccatgccaatataatttcctatatatgcaacacaatgcagctacaaggataggataaagttcatttgtgttatgtttagcaagaggacctaccgatntgtcagattacagttatataccttttgcttaccatgaaggcatcccctttttacattttagtacgacgcttcatcttacatcgggttttactggtttataatttatcatttattttttcagcattcgattgaatntcttcgactaaatcatgtaatttctaatgtctgtggttttacaagaacctttccaacaccttaaaggatgttctttagaaattagatgatctctaaagttcacattcctatagtca

SEQ ID NO: 77359 - DNA, 436 bp, Oryza sativa
  unsure (1)..(436): unsure at all n locations
ctcagcttcttctgggcgcaaaccacgagtcgccgctccgtagattactctcccgagaaagaaaccagccataccagtgccaccgactttcaagactatggctgacaagactctccgtgaattcgccctctactgacaatgtggccttgggccgcagatcaacatgggagacgtggatttcgatctgaggtccagcctcatcacgatggcacaggctagcccgttctgtggcaagcctaacgaggatgccaatgctcatctacagcagttcctggagatttgcagcacgtacaccataaagggtgtcagtccagacgccgtcaggctgcggctgttcaagtnttccctcctcgggaaagcgaagcagtggttttatgccaaccgtgctacgatcaatcacctgngacaaatggtccttggcattcctctcaaagtc

SEQ ID NO: 77360 - DNA, 444 bp, Oryza sativa
agcttgtggaactggatgaacatgtaggtaccaatcaacattgcaaccaaccaccaagagcgacgtctatagctttggtgttgtcttattggagttgatcacagggaagccgtctattctacgtgaaccagggcccattagcatcatccagtgggcacggcaacgtttggcacgaggtaacatccaacgtgtggtggatgcacacatgcatggtgaccatgatgtgaatggtgtgtggaaggccgcagacattgcccttaaatgcaccgcacagacatcgacacaacgacccactatgaccgatgtggtagctcagctgcaggagtgcctaaagctccaggataggcgatgtggcatggaagatacatataacaacttctatgccggcaacaacaatgatcccaactcaagttataacatgtacaacacggaccagtccactga

SEQ ID NO: 77361 - DNA, 473 bp, Oryza sativa
ctaagcttgacaatcatcttatcaccacgacgacgtagccgctgttgcataacctctactggagtagccagatgcccagaatcaggatccaatcgtggtaatgttgattgaacaacttcagaagcagctactgctttcttcaattgagacacatgcaccactggatgaatcaaactggtagcaggtaattgcaacttataggcaacagaacccacacgctgaaggatctgaaagggcccatagaacttgaaagccagcttctgattagcacgagtcatgacaaattgctgcacataaggctgaagcttcataaaaacccaatcagcaaccgcaaacacacgatcagtacgcttagaatcagcctgactcttcattctttgttgagctcgaaccaaatgatgatgaatcaaactttgcatgttatgacgatcctgcatccaactatccaatgcactaggcaccccaaccgaatc

SEQ ID NO: 77362 - DNA, 356 bp, Oryza sativa
  unsure (1)..(356): unsure at all n locations
atccttagagtcacctgctgcatgcaagctntcacataaaatataagcaacattattttgctgatcctcccttcaccttagcctcaaaccctttagaaatcatataactaatataagcccgataacctatataccttataaaggagatatttataccctaaacccttacccttctaaccgataatggtcttttgacaattcatggctcttatagaagttaaatctttctcttcttcaagcagaaactattgtattttggatgacaacctgtgggaattcgaggatccgataatcaggctgtctatcttggaattatttgcgctggagcaaagcaaattattattactcccctgtga

SEQ ID NO: 77363 - DNA, 416 bp, Oryza sativa
  unsure (1)..(416): unsure at all n locations
aaccactatgacatctgcaggtgactctgacacaaataaagctcctctcgaacctccgccgtggcatccgagcctagttagaggctagaaccataggcttgagaccacacgttggatcccatcacttccctgctagaaacattggagtactatcttgaagtcatactgtagttntttttattagatacatacgttcggtgaacacaggtgagttagttcatttcccggttcaaagtttcttgcatatgagataccgagaaacctcttattgcgttcgggatggtggaaagaactganggcttattcggatggaaaaaacgcagctgatttgcattcatatggattaatttctatgaataccattcggactgtaagaatgaagtatangaaaatcaaaaataactttccttttctac

SEQ ID NO: 77364 - DNA, 437 bp, Oryza sativa
  unsure (1)..(437): unsure at all n locations
agcttaacccccattaggaaaaattctagctacgctcacgggaatattatgcttcattctgattccacggttacaccgtctaacacaattagtctaccaactaaataaaccataaacaacacttaaattgcagggacctgttctaaacggagatatgcccttatccagctctgaataatcagccacaaaaccactgaagagaaacctggcaaataccttttctttntattctgtccttttcactttgatacttacccgcacatgtttaatttgagagttgtcatgcttcagcgtcttctcacgcgttttttaaagataattttagctttcccgataccttcagatacaatattttccagtataaaccttaataccttcaagttctaggtaccaaaaatttgttactttctcaacgattataaaaaatgggttgaaag

SEQ ID NO: 77365 - DNA, 334 bp, Oryza sativa
  unsure (1)..(334): unsure at all n locations
tggcttattcctcatgcatgtatgcatcaacgaaatcaccaaagtcttcatgatatcataaaggtcaagtgaagtccatgcactcaagtgaccacaaattattggacctgcctaagatcagcaaatctagtgaagccatgctgctgacatgtgagaataaagggcactctcaaaagccattctactcccattcttccttttttgacacaaccattaatctggtgctctgctttngtncatggcttggtgtgttcctaacttattagtcttggccactgggtccattcacagaggagtagttcgcactcacatagtgaagcgacaatcctctttg

SEQ ID NO: 77366 - DNA, 238 bp, Oryza sativa
  unsure (1)..(238): unsure at all n locations
agcttgaagaataatatttctcacgtgatgtatgatatttttaaaccgtttgcaccacgatgttagaaaaaagtgcttatcaaaagtagatccatcatgactatattttaactaaatttgaatgttgttactgcacgtaagacacatcggtactacacgatagttgtcgcattactgtaccgttcctcgagacgagagctaanaagaggcgggtggtggggggagactctccgctctg

SEQ ID NO: 77367 - DNA, 436 bp, Oryza sativa
  unsure (1)..(436): unsure at all n locations
tgattataataatccgcanatctccatataacagcatttttcttcggatgatcatatcttggtcatacgaactctgaatcgacccgttcaagtctcctaatgtttgctataacctaaagaaccctgtgctttctttttatgtattgttattgcttctttataggcttgtagctttgcttgtgtgcttcgcgtagctttcgtcgttccggaggttcccgaagcgtggttcgtggtcgtcgccgaaggttcggaaggccgttctctctgagcaaggcaagtcacatcacccttgagcatattgaatcccagtttataaaattattctgatttaaattatcgcattatcgctttgtttaaattcccgcgttatcactggtttatttagccatgcctacttacctttgttatgacattattattgctattngtattatta

SEQ ID NO: 77368 - DNA, 412 bp, Oryza sativa
agcttcttgttcggagttaaatttcattcctacctttggcaccttgtcttccatagatttggttgcatcagaagttccattttttccttgatcctgattttattgggtggtattattacccatacaaatgcaaaaaaaaaaaagaagatcaataaaattgacatttcagtggttcctatgcacatacacttgattggaattatgagagttgtccaatgagacaattcaacttagatccaaataatttaacaaagtgtaaaggagaacaaatagatcttacatcttctaattgatttcttcctaggccatcgggtggatccttggattcatcaaggtttctgaatgttggcgccgaagtatcatccaagatgccatccgatggatccttggattcatcaaggtctccgaatgt

SEQ ID NO: 77369 - DNA, 458 bp, Oryza sativa
  unsure (1)..(458): unsure at all n locations
tatctatctctgatgaagcaagcactagctatagagctatctaaactagctagccaagcaagttaaacgcagcaatccttgacctaagaaaaggaaacaggacaacatattacttaattattataattatagttatgtgcataatgtgacggcgccatgtacttaaattaattagttaaagcaatgaaggggaaagaataattaatggtggcagctctgaccacccatgtgtcgacgcaaagtttggcgtgtcgcacgctaaaatgtctgtcgacgtgtgtgagcatatatatatacatgtcgctnttattctgttatgacttgtgataacggaactacatgcccctttatatgaagtacaaataaattagtactaatagtatgtagatagggaaattaattcagaggacgtgtcgaatcanaattatttctcttanaatatactactagtaatatat

SEQ ID NO: 77370 - DNA, 435 bp, Oryza sativa
  unsure (1)..(435): unsure at all n locations
agcttcacctcatcgcaagaaagagaacctgtccgccacctcgtctccagttagcttcgaagattcgcgtgatgggtgaagctgtgcccgatcgtgctgaacctgtcatcgacatcataagtgatgaggaagaagaggaagaccctgaagaaagagagccagctactccagaggaagaagatccatcgcttcgttccgacgcaaggcggaattagtcgcttagattagatcgttgccgtagttcgctgtgttagattgcttgtttaagtttgcttgtgagtgtgtgggtttttagttgttgcttacatcatgggtgggatgtaacagcatgagtctagttcttttgcttgtcagagtgtaagatagttggtgagatagtgttaatgcaacttaaatgtaatcatatacagtanagagccatatagaatttaaatt

SEQ ID NO: 77371 - DNA, 410 bp, Oryza sativa
  unsure (1)..(410): unsure at all n locations
aaaactttatacatatggaaaaggaacgatttggttttactattattacatggatcttgtaattgtttcagaattggagagttcttttgcttcaaggtttgcatcttgtttttgctcaactggcactgtcagactgtgactgtctccaatctcatggagctgctctgttgcctctgttttggacttttggttagaacggttactgtgtctcaagggctctgttttgggaaccaggatttttctcgattcatgccataactgaactattcggtactatacctccgatccaaaatataaattatagctatgtatctgcattgtcaagatctcttatatnttgtgatgggggtagtatttctgtatgaattcacgcattctggacatgacctaacacctggatggctggatcc

SEQ ID NO: 77372 - DNA, 435 bp, Oryza sativa
agcttagcatgttgcctccttgggtctcacacctctgcaatctggtcgacctctcgctccgagagaacttccttgatggcaaggaggtcatcgagcagctaggcaagctccctagcctcctctccctcaagctctactaccagtcatatatggggagagagctccacttccgggagaagctattcccgaggctcaagcagctgatcgtggacaatatgcccaaccttgatgagcttagcttccaaggaggcgcccccgagcttgagaggctcacgctcgccgtcctcaaggagcctgcagatggcatctccggcattgacaagctcccaaggctcaaggaggttgagttctttggccatgtcatcgtcgactccgtggtggagagcatggtagctgtgtgcaaaaagcatcctaacaagccgagagttacagggg

SEQ ID NO: 77373 - DNA, 308 bp, Oryza sativa
aagctgcagtaacaacaccatcatatcgcattataatgttttctcgacattataatgcgcgccattccacactagctagattaatcaaattaagaacaatcatgtatcgatgaactcagaggctatctggtcgatgtcacgctcggcgtaccactacggactaacacatgtcggctagctagccgtgcccggctatctgtcttgctcgccgccggcgccggcgagcatcccgtggtgcaccctgtcgatgaacttggaggccctccgatcgatgtcacgctcagcgtaccattaccgcccgtagtagt

SEQ ID NO: 77374 - DNA, 444 bp, Oryza sativa
  unsure (1)..(444): unsure at all n locations
agcttgtatatgttgattctatggaggaaaactctcatacaaagtaatacttgtattaggacaaccatatcacatataaagagccatgctgtgtcataagtacatatggttgagcatggaaccgtaagcattaagctttattgttgagaagcaaaaaaatttacatggataaatacggcaacaggaaagagcgaattcctggaaggaaacatataacctataagactaattaaggccagaaagaacatggtgaaatatttaggcgtctatctcaagaggacttgtatttacatgccgaacaatatgagataaaccatcttaaaaatttcgataaaaacaccgacattggaggattaaaatattccacagctaatgaaattgattntactcttaatttcttacggaagaaaattgcatggaacaaagatgcacatgtttctacct

SEQ ID NO: 77375 - DNA, 403 bp, Oryza sativa
ctgaaacctgcaataaagacatgacaactttggtgtgtttagttccacgctaaaattgatagtttgaaaaaattagaacaatgtgacgaaaaagttaaaaatttgtgtatgtgtagaaaagttcgatgtgacgaaaaagttagaagtttgaataaaaaagttggaatctaaacagggcctttggcagataacactagtccttagtaggatggcttcatttataatatctggaagcctactattttcggatgcgcgcgcgtcttctgctcattgcgctaatcttctagcttttttggttggaattcctatttcacacgtcttgtgcgacatggacggctgtgggatggcgcagtgcttgtcatcatggagtacgtacctacatatttcagatgcatgatttaat

SEQ ID NO: 77376 - DNA, 436 bp, Oryza sativa
agcttgaaaagcatccacttagcgcaagcggaattctctcgacggatcacccccaccaccaaacaaaaaaaaggaaaaaaaatccagaacccaaagcatcctagaagagctctaatcaagtacagcccaaactcatgctagaatccacaaaactttccactgttctaacagattacaacaaaatattactgcattagaaccaccgttaccagctcagactacagtactggtaagtggctaaaataaacaacaaagaacaaaagcatatctatgaacaaaatgcacggctacagctacaacacatacccatatacttttcattagtaaaaagcaccagacaagaacgaattccgttaaattagcactaacagacgacaccatacatccatcaccgcattcgaaaccattacattttccctttccacaacgaagccct

SEQ ID NO: 77377 - DNA, 441 bp, Oryza sativa
  unsure (1)..(441): unsure at all n locations
agctntagttcaattttttatgaaattgtgctagatgttatgtcagatccatgcttactattgcacaaaataattttaaggcacctcttatatctatatttaggagtatccgtcactgcagttttttgctttagtgccatactgattacttcacattaaacatgcctcgtgcatgattaatttttgtattgtgcaattagtattcagtgcttctaaaacattgcgtattgatattggagtttggcttttgatattttatttatggttgctgtataatgtgaggctattactacaacatgctcccacaatttcatcatatatggctattcattcatgatactactgcttgtctgtatatacatacgattatcttttgaatccattatgaattctggagacattcatttgctgtatatacatagggttttgtttagtttcatc

SEQ ID NO: 77378 - DNA, 441 bp, Oryza sativa
ctaagcttggctgattataagacgcctctattgactttattgtatactatattatggagagagtagagtagaagaactcggaggagttctggagttgtcggtaatcctctccttatttcttttgctctgttaattactctaattataatataaatatcttttgagtaatttagttttgcttggtgagaattatttcttggttagttcctaatcagcatacgggatcatcgttcactataatcaactaaaatatagtgatttactttagtgtgtagctagcattaaaataagtaattaatcagcttagacgcagtgtttaggtagttaatttccggtgtttgctccgcatcctacagcaagtgtgaggtgggtgtagaggtggtgatagccctcattatcactgaagtcctctctgtccgggtgtgcagtagagcgatatct

SEQ ID NO: 77379 - DNA, 326 bp, Oryza sativa
  unsure (1)..(326): unsure at all n locations
agcttagcatgttgcctccttgggtctcacacctcggcaatctggtcgacctctcgctccgagagaacttccttgatggcaaggaggtcatcgagcagctaggcaagctccctagcctcctctccctcaagctctactaccagtcatatatggggagagagctccacttcccggagaagctattcccgaggctcaagcagctgatcgtggacaatatgcccaaccttgatgagnctaccttccaaggaggcgcccccgagcttgaaagctcacgctcgccgtcctcaaggagcctgcagatggcatctccggcattgacaagctcc

SEQ ID NO: 77380 - DNA, 428 bp, Oryza sativa
agtaacaaacacgcaatcatatccgacattaatattgtatatccgacattaataatgcgcgccattccacactagctagattaatcaaattaagaacaatcatgtatcgatgaactcagaggctatctggtcgatgtcacgctcggcgtaccactacggactaacacatgtcggctagctagccgtgcccggctatctgtcttgctcgccgccggcgccggcgagcatcccgtggtgcaccctgtcgatgaacttggaggccctccgatcgatgtcacgctcagcgtaccattaccgcccgtagtagttgttgtcgtcgtagtgcgccggcgagcatccttcggtgtacctgttgatgaactcggaggccttccggtcgatgtcacgctcggcgtaccactacggactaacacatgccggccagctag

SEQ ID NO: 77381 - DNA, 436 bp, Oryza sativa
  unsure (1)..(436): unsure at all n locations
agcttggcagttcgggtatgtnttttctctcttcctgattttcctcttcttttttacatgtcacataattaacatttgttctctttgcccattcctaccttgcatccagattcttgtagctcactattcgacagagtgaaccgtgcgggcccgtcttgacggattcaagaaccgtcttcgggccaaggatgacgaaataggccgcaagaacttgcaggtggaggccctcgccaacaccctgaaagaggcgaaagccgaaaacaagcggctccaatccgagttagagaaaggaaaggaagctagggccgaggtcgatcgcctcaaggccgaactggagaaaggaagagaggccatagctgaggttgatcgcctccaggccaaattgaagaaagaaaaagcccattccgccgtgctgacggattattataatcttact

SEQ ID NO: 77382 - DNA, 470 bp, Oryza sativa
  unsure (1)..(470): unsure at all n locations
tactcagcttatctgttaatatgaagtaattntccttaagtattccttctcgtttgttctagacaagtgtttatgctaaggaccctataggagaaacctcttcggttggttctcgtttttagcctgcatcttgcataggcgtctggagaatcggtatccgtagagaagtgttcccttcgggtggaactgcctggggagacgataaactcttagctagaacaagtgtgacttggaatatcttgttaagttgcttctaaaaagatagataggtgaggcttacggtgagtaccgagtaggactntacatcatccgaagcaagcttctgaggctgtctaaataggattcgccaccctgcaaagatcctaaagttaaaatatctctcgaagtgaacagtattgaacagtaatttaaacagtaaactgaatagtgtttttgaatagtaatcagccgaataaacagtaaactgaata

SEQ ID NO: 77383 - DNA, 433 bp, Oryza sativa
  unsure (1)..(433): unsure at all n locations
agctnggtttattttatttacttaccttttacttggattntctaaactttattcaaattaatccaaaaacttgtgctattaattggataaatgtcttaactccctcctttcacttgtctttagatgccgcgctacaagcctgagtatctgtttggtgttgagggttttgtccaggagttgcgtacgatgtcctttgtcattggatttgggactgcccctttttatgcccagattcgtcatgatcgtcatgaagagaagtgccgagtcaaagtcaccttgaacagtaatagtgaagatattccctcagtgatgttcgaagctggaggaagaaactacatccatgcatgtcaggaggtggcaaggatcgccataggagagctccgtgatcgctacagtgatcagttggcagacactgagtatcgctaccatcctc

SEQ ID NO: 77384 - DNA, 479 bp, Oryza sativa
  unsure (1)..(479): unsure at all n locations
cactatnaatactcagcttcttaacaaactcctaagctcacggacggtggcacggtttattaagaagttgctaatgtggagagcggttacctgataccaagaatctggttccacctgcctgctcaggattgcctcaagctcgccgcgaaggtgggcgaacaatcttctcgcttcctcgagacggcgatcataatctccacatgttgccaacacaaggcatttatctcgcctgtcgatgatattgttgatgatgttggggaagcgcgcgatggagtcacgcactgcgccgagcagggcgtccaattccagcagccggctctggctctccatgcgcgccgagctcagaatgtcgatcaccctctgcagatctgctgcgacatccatggctccctgatactcttaacgctctaacacctctctcccagtctgcttctcggctgatctcctcgcttccgtagtcccgtcgcatatagactaca

SEQ ID NO: 77385 - DNA, 464 bp, Oryza sativa
gggatcttaagtcaccgcggctgcagcttatattagccttgaccttgattatagatttgttattcagtaattaactgatgggagtgatgcaagaatgctgatcacaacccttggtcggcataaattgaaaccccgggtttatattgggtgcatgaaatcaggaccagttcttgctgacaagtaaatattctggaaacaacataaaactacttctggaagctccatcgtatgaaatctctagatgctaatattcatttttccctgcatctttttatcagaaatgtgaaataccacgagcctgagttctggaagtttggcgaagacgggaacaagtatttccgccatgccactgggcagatatatgccatctcaaaggaccttgccacatacatctcgatcaaccggtaagcctagagaatggctgcacatgattcttcagacaaaatattcattctactgaattg

SEQ ID NO: 77386 - DNA, 443 bp, Oryza sativa
  unsure (1)..(443): unsure at all n locations
tccttgttgataaatcattttcatcgacgatgagactatttgctttatcatcgccatcgctatattcacttaactccgagcggattttctcgatctgagattgaatgtcagaaaactgcttgagcctctcctctttcttgccttttaagttctcaagtactggaacgactgccgcaagttgttctttgagtggaacaacactcttgtctttctgcacgagtgtttgagaaattagtgaatacagcaacccagacaaagtcacagtaaaaaaaggtgcagttcatctatcaagcagcaattgggttgaactgtttcacagtaaaatgaacagtgtattatcaattggaatccacacagttgtaaagaaggtacttgtgctcagactntaccatngttccttatctntgtagagataagttatactgacattctaatacaaatct

SEQ ID NO: 77387 - DNA, 430 bp, Oryza sativa
agcttgacaaactcgcaatcaacaagttttctccgactggcctattgaattccatcaaattaagaagagaaggccctctttgcctcatgacagagcacaaggaggctctatggagcacatatgtgtcaaccacaaagcctgatacttctgttctaaataggcttattgatgcgggcgtatcaccgaggattgaggaatccatgtcggttgtcaacaatgagatattgcggcgacatttcttggagctaacaaccaacttccttgcacctttcgggccatatctgagaaccaccacgccatcagaaggaagctctccttttgtcgatccaccattattgcctccatttcatgcagatgaatttgtcaatggtctggctgctagaggtgcagggaaatttttgtccaaaaggatgaagtccaattggttgga

SEQ ID NO: 77388 - DNA, 417 bp, Oryza sativa
  unsure (1)..(417): unsure at all n locations
ccttcttcaatgaagaatcttcccattctgttgatgatgatgatgatgatgatgatggtgatgagggtgacaccgaggcagctgctgaggatgctcccactgatgttgatgagggtgacaccgctgctcagtccgatgagtctcatctctccggcgatacagagattgttccctctgatggagatgagtgatcatcttcttctcttcatagtttctcgcctttntggtgccttgatgccaaagggggagaaattgtgaattgaagggggtcatttaaatccttatcctttntgctgccttgactggtgtctggtcatttgaccggaagttccgggtcctatgatctggaggttccggccaggcagatttcctctctattatctctctctatatggacatgtaatcgtattctatttt

SEQ ID NO: 77389 - DNA, 435 bp, Oryza sativa
  unsure (1)..(435): unsure at all n locations
agcttgntagcatgaccatatataaaatcgacaatctcgagatttgttggtcctatttgttagagatgcttttagagatgcttattcttagagatgcttataagaataaggtgtacgtgtgttgataggctaagtgtgcatgtgttgtgattagtacctacatttgcatttgtattgtgtttgttaaaaaaaagattcaatctgaactcagctatatacgcgtagtaattggtaaaagtgtagtgctataattgaatcgtggtggtgggttgagtcagaattattttaacaaatatgaaatattgcatttgcaatgttttgaggtctaagatttattggatccacgccattgtaagtttcacggttttgatatacgccattactattcaactatnntagaaacatgttattacaatttaaagatactggagatat

SEQ ID NO: 77390 - DNA, 401 bp, Oryza sativa
actcagcttaacgttgcgaccgatctgagttgaaaagcatctctggatcatgcgttgataagttgctcctgtattttttagtccaaaaggcatggtgatgtagcaataggccccgaagggtgtgatgaacgaagtcttcaagcagtcggactcctttagtcggatctgatgatatcctgagtagcaatccaaaaaactgagtaacgcgcagccggccgttgaatcaactacctggtcaatgcgaggtaacccgaagggatctttatgacaagatttgtttgaggtcagtgtagtcaacacacatacgccattgtcccgtcttcttccgaaccaggactgggtttgccagccagtcgggatgtagaacttccttgatgaagcatgctgctaacagcttggtc

SEQ ID NO: 77391 - DNA, 437 bp, Oryza sativa
  unsure (1)..(437): unsure at all n locations
agctnngaattatttgatctttgttggtggtgtgttgtgaggtcatggatgtataatggcgagtacacaagacaaaggtaaaactaatggaggtacttgggagttgggaccatataaatttgtataagttacatatcgttgacaaatgtgctgcatgtaggctgttgctgtggaccacttttctgtagcaccagctttgtttcttgactttgtacttatctaattttctctattgagctaatgttacatacacctgttgaaacccacattgaaattccaattggttccacttaatcccagtcaactttgtatatagctggttgtttggttctttcttatattaccatgcttaagagttatacatgaacaaattatctgtgatcaattttccttaggtcagagttttcactaagaacaagtttgcattactaaaaata

SEQ ID NO: 77392 - DNA, 464 bp, Oryza sativa
  unsure (1)..(464): unsure at all n locations
ctaagcttgtactttctttcttttgtaacttgctattagctgctattcttatcatgtagtaacactcggaaaagaacagggagatngtagctaagaaaatgaaaagcatagcaatgttctgattgagatataccttacctgacactgtgaagtgtaaacaccttcttttatttctctttgagatggcaacacttgctctcgatgtgcactgtattactgtaagtctgtaactcacgcctcatagcgaagcttgcgctattgcgcaggagtagcagtggtctttgtcacaaggtaaagcatagcatctgaacatttacatgtacacatgccaacttgcgtggtaagattcacgggacgagtagatgggaagcatttcgctgatcgagctgcagaaatctacccgcgcaatttgcttgagcagatcaatcctctgaaatgggcttccaaatggaagagatgggctc

SEQ ID NO: 77393 - DNA, 436 bp, Oryza sativa
agcttatgttctatgcttaacataatgaataatatgctagcatggtctggaaattaagtggcattttacaagccatcagcatgaaagttttgcaaggtcgtcttgacatgataaagtggaatttctaatgcattatagagttcagcttctccaccgttttgtattgttatagtgacatttgttgtcacaaatattagacgtttagaataatatctgtgaaaatgtttgaatctgtaatcaccaagaacttctccaatataatgctttgtttagaaaataaaaggttaatgttaaatatgaaaccaatagtcaatgtttccagaagtttaactgaatttgttttgaatgtaaaatgcgtatgactgaaggattatattgctcttacagaccactgcaaaaagcatccaagctagctagagtgtatactgagccttat

SEQ ID NO: 77394 - DNA, 446 bp, Oryza sativa
  unsure (1)..(446): unsure at all n locations
tctgattgcanggagttgcgtggactgacgtgccggcatgtttgtttctcggtttgggcacttgtcggcgaaatgacccattccttgacaattgaagcaacagatatcttcccgaactcggcattttcttttctcattttgattcctctgtcctggcactggagttaggctgaaactgtaatgttggcgaggatttgtgtttccttgatgcttctctccgttagaatgggcgtgttggtcggccatcttcttcgtcagcagaaaactgagttgacaatcttttggtacatgatcagttccttcacacaagaaacaagtgatcctgctcatagggcacctatcgggtggatggtcttcctcatcaacgaacgcatgtaaggcacacgagctggcaacatgaccgatttctccacaacgagagcatgccttaagttctantttattct

SEQ ID NO: 77395 - DNA, 439 bp, Oryza sativa
agcttatgttataaaatagcagataaggtcttggtgtaataaaaagagagttgatttctctatggggtcctgaatttgaaatgcattgcatttcactactcactatttgattcgacaactagactttgttttggcgcgtaagatgtgaaccattctggctatctaaagctcgctgtcatcatcgttctcatcggatttgctggctggctcgccattgacagcaacaagctcggtatcgaaaatgagagtcgctccacctgcaggccggaacataacaacaccagatcagatcagatatattacatatgtagtgaaaaagtcccgactagaaaaaatatagcattgcagcagctccctcagacaatgtggccatgtgctgttgtatgataaactatttttattatacacaacttctcttgaaaggatgcccattctactt

SEQ ID NO: 77396 - DNA, 469 bp, Oryza sativa
  unsure (1)..(469): unsure at all n locations
taacgcaaagctgcagccaaatgtacacctctncaagtcttatacatattgactcttgagaagcgntttttctcaaacggctgaacagtacactttcttaaaaggaataagttcctgaagaaaaaatacttttaaaaaaaattaactaatatttaatttatcatgttagttgttctgttacattcgaacagtcttattagaatgcgcttgcaggcagatctcatttcttgcattcccagcaaggaatgcagacatgcagtacacatctgaacgaaaaanaagggctcaaaacaaacaatcacgattagcacacaatttgcattgccctccgttaacgccatggttctggtttttggaggctaaacaacagctacagatgtacaccatacttttctttcggccgcccgggttcataccaatttctctgacatgttacctcgcataccaatntgacanacgatgtagtact

SEQ ID NO: 77397 - DNA, 281 bp, Oryza sativa
  unsure (1)..(281): unsure at all n locations
agcttgtntagtctagcagtagagacatgctgtattattgaaaggccgagagtttgctattgtctgaaaagagaggttatcatctgtggaacagaagatatcactgcaaccctggtgatgtttcaaatgacacagttctgatatattatgtatatactgcctccgtctggaaaaagatgaagttctggcctcaacgcctgaagacaaagacatttctttacagctaagaatatgacagctctgccccttactaaagtaattaatgttccaatcattgaaat

SEQ ID NO: 77398 - DNA, 418 bp, Oryza sativa
  unsure (1)..(418): unsure at all n locations
gcaccttcgtcacgtgtgcatccatgaagtacgtaaggattgcctatgaaaccactgctgcaataacaaaggtagccaagatattccatnagaatgaagctgtctatgcatgtactggtggcgctcacacatgcgtaatccgttcggttatcctttgcactagcacatgtcggttgatcgattatgctccacgtgacataggcgtaccagcttcttatgttgattatgttccataaggagtttcgactagagttccctccaagtaaaccttcatccncacggacgaaactgagctgcaagttagcaacaccgtanatatcatatgtgcagcatccagtaccattacagctntgtcgagccactgctttctgtgattcttcctttgggcaactgttcctgcagatccttgtgcgaatat

SEQ ID NO: 77399 - DNA, 463 bp, Oryza sativa
  unsure (1)..(463): unsure at all n locations
tgcagttgatagctatgggacatcaaatggtgacaatctatcccctgctctcagtggttgccgcaacggtaacatctgaacagatctcacaccttatacagttatagtgccatccttttgtagttgcttcaatgtatactgtttaattctctctacattacatatgcaggtaattccatgtatgtggcttgtcattgcaagtcttggcagaagactccgccaaatatccaaagaggctcacattagtcttgccatgcttacagtctatctcaatgatgtatggtatttcattttctattattcagtgatgtctgtagtcctacagagtttgttttttaaatgaatttccttttaggtacttccatcgatgctcactgtgaaggcaaacaatggtgagggcaaggagatatcgagattntcaaaattagttattggtgatctaaagaataatctaagtaagaag

SEQ ID NO: 77400 - DNA, 437 bp, Oryza sativa
agcttgacacatgccacactatatttgcatgatcatgcacgccgactttatccgtcaacttgctcatatttatacatatcacaaatgcatacacgttgtatatatgcatggctgtacaatgttccgttttatacatagatagtgggaaagtgattttatcacccgagcggatatctctcgtttcgtgcatgccacctaaatagttatcaaaaaatatattttttaacatagattaaaatgaaatatatcactccacaaacatacaaatttaaatttaacttctacaagttgtaacaaaaataacaaatatagttgtgaatgtgcgataactatttccagtttaatttgttatttctgttgtaattgtagaagttgaatttagtattgcatgttcgtgaagtgatatattttgtattaatccatgttatcaatatatt

SEQ ID NO: 77401 - DNA, 430 bp, Oryza sativa
tcggtgcctgatgccattctgtttctactttctactttatgcctgtacctgcgtataaatgcattgcaatgggagtatttttcgttgctttctgcggacaaagcttgtgatactggcaatgcgtaaacttcggagatttggtgccttgtgaattttcgatgagtattgtgatgggtggaccctggacagttgttctgccgggcggcgaggcttaccgcgcgttgcttgctccaggagaagagcgtcaggccaagccggataactcgctccggcacggtcatggtcgcgccggtgaccgccttctggttctgggcaggcaggcgcgctgccaggcagggtttacctttttcgttttttaagtaaaaactgatagtcggtaaaaactgacaactttcaatcaacgttgtacgaaaaccagttaataccgatc

SEQ ID NO: 77402 - DNA, 404 bp, Oryza sativa
ctgcatgcagctttctcaggccttcgcaatatatttattgaagcacgggggagggtcttccaatcatacaagatgctgatgacaccttgatcttgctaataacatcttcataaagaagtcctctgtttcaaggctatcttgaataatgtttgtcaaaccacaggccttaagggaaactataataaatcaaatctgtcccccttaatatgtctcaggacaaagctgatttactagctagcattttgggatggaagagcggttctcttccttacacttatgtggggctacctttgggaaccaccacgcctagagtggtagactttgctccgctcggagacagggttgaaaggaggctgacatcaagctccattcttttgctcaaggaggaagattaacattgatca

SEQ ID NO: 77403 - DNA, 435 bp, Oryza sativa
  unsure (1)..(435): unsure at all n locations
agcttgtatccttttcttggatctttagccttctgattntaggaatctactttactaaaatcttatgttcttactccctcaggtcactactatatgatgcttaacactaatttcgtttttaacactaaagttagtgtcaagcatcacatattaatggctggagggattattaaatgaaaaccaaagaacattgtcagaataattgaaaacgttattgaacattattttcttgaggaatgaaatgtcgattataatgacacccacaaactgagactgatacctaggaaaggaaattacatagaaggcagatgattaatactgttcttgtttgatgaagatctgcattcacctcttacaactaagggtgtcatatgtcgagagcttgatttatccgttaatttttatgaatgttgttatgcttntgttgtttcctat

SEQ ID NO: 77404 - DNA, 404 bp, Oryza sativa
atagacctctagggccatgtaatggtggatcccaaaaaattctacgaatcaatacaattacttttaaattccaactactggtaggagaaccacgcctttcgacgtggcatagttgtccatttgacaacaatcctatacgaacaaccatctatttttatactagtaagtacaaagggatacttaaaattatgcacgcttaaaatattataggagttaatcctatttctattattgacatttagtataactaacaacgatctcttcttctgtgcttcgtgcatatattcagcacccatctcttttgctgcgaacttcactcttctcccaatcactactacaaaacatcaaatagttctcgccactatagataccggtagtgctaaaactggtacctatagtccttt

SEQ ID NO: 77405 - DNA, 393 bp, Oryza sativa
agcttctcgggttcttggtctctgcctctatgtttgaggccaaccccgagaagattcgagctattgagcggatgcgcccccccagcaaacttacggatgtgcaatgcgtcaccggttgcatggccgccctaagtcgcttcatatcaaggctgggagagaaggcgtgtctcgtcccatatcgactctaaaattcatcctccaaattgtgcaaaagaataattaaaattcatgtgaaagccttcaacaattaaaatgtgcaaagataaaagtccaatgaggcttggaggatttttgtatatttcctaaaagcctaaaatgcttaaacaaattttagtggaattttcagagcacaaataataattgaaaagaaatgaacacagttgaaaacggtta

SEQ ID NO: 77406 - DNA, 465 bp, Oryza sativa
  unsure (1)..(465): unsure at all n locations
tcatgatcatattctataatactatgatagtatcattcttcttcccttcaagtcatcatcaacaacatgtgcagtttatggtactgagcatgtggatgtagcgacggccgccatttttatcttgaaagattacttgcatttagagctcctccttttctggagctcaaaattntgtcagctactgtaacttggccgcctgccttactggtgacttctacttagcgctcattgcgtacaccgtggtcttatacaagccagagcatctgcagctctgctgatcatacatgtcttgagaaacgatcagtttttcgttagtgttataataattttgaaaaccaatttattaaaggaactacatcgcattcagtacatatttgacccactaaatatgaatntcctcanaaatcataatgcgaagtgaatgtgaccaggaacttctgtctttataaaacccaagaattaata

SEQ ID NO: 77407 - DNA, 431 bp, Oryza sativa
  unsure (1)..(431): unsure at all n locations
agctntatcactgcctcctnataatctttcttgcaatcaaacancattccgagggcaagngnaacagngggctnggcgggattaaatatggggtactttgacttcttcgtgactaactgtccatcactattttcttcatatgaatcatcatcagcactactactgttctcatatgggctagcagtatcctcaccatcaatctgaaccaaagccctttcatttgcctggcttgctgaccccatatagatgacatcatccaaatttcctagctcaccatccttcaacttcttcttaaactcattgcaatccttcctgatttgcttgacctcttcatcttcttctgaagaacacgagtctccaccaatgtaatcactatcagattcagacaaatcagctatcttcaaattatctttagctactacaactgcttt

SEQ ID NO: 77408 - DNA, 383 bp, Oryza sativa
  unsure (1)..(383): unsure at all n locations
ggatacctatcgtaccagccatgatatccgtatgtaccatgtctaatacctaggtatcagccatgataccaaaggtactaaacatggtacctacaggtattgattgcggctgatgcattgcatgacatacctgcacacactccaacgaggagcatgatagctcaccaagacatcgtagctctgtgtgacctgcctgggagaagggtgcggtcgccgcgtccacctcctgcttgggcttcaaggcagtggtgatggcggcgccatagtacgaggcgctctacgccagtgcaccgctggcgaacaactcggcggcgtcggcccggccaccaaaggagaggatggtcggcggnggagacctgctctgtgatgcacgagtcccagct

SEQ ID NO: 77409 - DNA, 73 bp, Oryza sativa
agcttggccattgtgccaaagactgtcgactgctcacgacgtggccaggcccacgtcgcacgggtggaggaag

SEQ ID NO: 77410 - DNA, 414 bp, Oryza sativa
tcgcttcttgaactcttctgttattgaactcccctacaatcattgttccatcagtaaaacctttcagatatgtcatcctttttgcttcagcaagcttctccttgtcattctgactcttaatcttaagatcgaggcacaccttctcaacagacttgtctccaaattcaggaatgttgattattggtacaaccttaaagggaagaacccattcatctttgacaccatacttctgtctcaaagctggctgtgcgactaaatcctgtagtgccatgaaatcatctggagaatcacttgggacactagtcacaattgccagtaccttatctgttaagatagtaagcatgggaagtgcatatatgatctcattgaaggcaagaggcgatctcagtggtaaccaatcagatcacaaccaga

SEQ ID NO: 77411 - DNA, 400 bp, Oryza sativa
  unsure (1)..(400): unsure at all n locations
gcaaaccggcgagtagtgtgttacagaacacacacattttggggtgtttctaaaacacacagggccaacgcgccccaaaaaccatagccagnccgacgcgnncncgcanccaacaaatgcaaaagcaacaggaacgacatggctatccgcggcgaccccgaacgacagcanaaatngncccccgaacccgcccgccatgaaagcgccatcaacacagagcaaaggaatgcaatatttaaaggcctctattcatggacccaaatgaccagaaagcccgacgaagaacattctccccatattcattcacctcatcgagaatagccatgtgtgtacccgcggttcttgcctgcatcacctccaacagcgggtgaagattgcgataagataactcataagatca

SEQ ID NO: 77412 - DNA, 396 bp, Oryza sativa
  unsure (1)..(396): unsure at all n locations
cagagacgatgccttgttcaagatgggccctgcatgcaaggagttgcacgggtactacatggagaagtccaacgcgaggaagaagaatagagagacctccatgttgggccagcacgatggttagccgttcctcgggcctactgccttcatcgccgtagacttcaaagatcaatgggacctctacagggtgcgagcgatcgacaccaacctccttaagtgctactccttgtaagtatttcttggtacgtgatatggtagtgactgtccacaaattacgcttaccctgactcttgtcttgctcgtaggttaacctggaagcatgtccatcataacgcaccccatggtgccttactcgatccagctgtcgtcaatgagacaacgctgaanaacgatcga

SEQ ID NO: 77413 - DNA, 434 bp, Oryza sativa
  unsure (1)..(434): unsure at all n locations
agctttatcagctgcttctcgctatagggtttctgtttttatcagctaaatcgtcttgctagataattagattaccttagacatctaccaccttgaaaaatagtcaacggctcgattgtctaaatattgcgcctattctcatacttagtgttgcatcagtacattcgacctactaagtcgtgttagaaccataatctnaagcatgctccctgattgctaattggagaaccatcggggcttcagccgatcttacctaatacacatgcttctttatctgtttcatgtatattcgccatttatatagacaaatcacctaatagtaatatatcaagtctaggccatatccgctgggctatcaatattgactattgacctctatttgatatattactatagncgactngcccatatagaaccgcactacagcataccct

SEQ ID NO: 77414 - DNA, 465 bp, Oryza sativa
ctaagctagcttgtccttgttcgcaacattctcttcatgcgcttcgttattgggagataccacaccaactttgctgggccttccctctgacttacttccttcaccttcactctttgctcgtttgtatcttgatgccccacagatagggcagacatccaagtcagcgtattccttgtaatacaaaatgcagtcgttcggacatgcatgaattcttctgacctccaggcccaacggacataatacttgcttcgcttcatatgtcgtctgaggtaaattgttcccctctggcaacagatcctttaacagctcaaggagttctgtaaaactcttgtccgaccagccattactagccttaagcttcatgagttccaacacgcatgacaacttgctgtgcttcgacttgcatccatcatacaacggcatctggcaatcttccaccaacttactaaacttctcataatctct

SEQ ID NO: 77415 - DNA, 446 bp, Oryza sativa
agcttgtctgagccaagctgattcttcaaatacttagcggtttcaggctgactactggaaatccttggcggtagtaggttgttgaatctcagcagtctttgatgcttgactgagccaatatgattcttgacattttattatttgaggctcactggagccatgaaatcaaaacaagttaatttccctatgcagaaaacttgagctgaaggccatgtttgttttctggttgatttttatcatggagtttagggttgagtttgattagaaaagccgcatcagtacacttaagtataaagctgaagttttgccttttcacagggatggtgttagtgaagggcaattttaccaggttctattgcatgagcttgatgcaatccgaaaggtaaaactttcccctatttttcagactttatgacttctcttaatctttgtgtcttgctccctct

SEQ ID NO: 77416 - DNA, 300 bp, Oryza sativa
ctctgtacatttacatgaagcacatggttttgaacatagctgcattctgtggttactgctattgttactttggactctctattgattggatatttggctacctatgatgctcaaccttttaggacagggcatctgtgcattcatgactgaatgataagggtgtgaattaaagatcagatggtactcactgcactgcttgttctgtgcatacagatcttgtctccctctaagtggtttgttaggttgtggctcatgctgaatattactgtgattgttctaataagacatgcatgctgtgtt

SEQ ID NO: 77417 - DNA, 444 bp, Oryza sativa
  unsure (1)..(444): unsure at all n locations
agcttattaaggatgcctccatttatcctctcttcaagagcattcttaaaatacggagagcacattaattgttctgcatatattcaggttatatatattttctgcatatgctgaggtttaattccttgacaacaatttttttgggatctcattctgattgaaaagcaaggtatcggaccagaagcagaggcctcacggttacctgngccaggcgtctgtatgtctcatgggccttagcccatggcctaaagacgcctgccaataatcgctaactaaaacattttattttattatttattattaaataaatcatgtgttgaacaattagcggaacttgtgacagaccatgtagtagtccttgtagagtagtgctgacttgttgatcctaacagcatggcttgactccaagccggactattattgataacaaaacggaagattggt

SEQ ID NO: 77418 - DNA, 452 bp, Oryza sativa
  unsure (1)..(452): unsure at all n locations
ttgtcttccctgcctgagctagttagttagtggatgtggtctgatatgttacctcttttttttgtgattggaagttttctttttttcattggtcatgcaaactttatttttttttcacagctgactctccagacactgttaatgatgattttactatgcgagaggactttctcaaggaatgtgcgcagtggtttactgtacttcctagaaactctgagaaaaatactcaggtctttccccgaaaatttttcaacatagtggatccattgaagcagagtaacaatctatggcgcagtgtcagcaaaggtttgtttcttacatctagatcatgtgttttgatggtaggattggatgattagtcttcgaaatatcacaactttangtcaatttggaaaaaatgatgtgtcaactcgtttggtgtaacttcacagttgctttcaaattcatcttca

SEQ ID NO: 77419 - DNA, 467 bp, Oryza sativa
  unsure (1)..(467): unsure at all n locations
acccggatccttaagtcacctgcggcatgcaagcttcactaaggataacccatgtgcaccatctaaacgctnggaaatgaaggaatgggttgcaccaaaatcaaacaatattactgccggtgtcgagttgacggggaatgtgcccaatataacctctggtgctgactgcgcctcctctgcagatgcatgattaacacgggcctgaacgaacttgggtccagcacgtcttggcttcgggcactttccaaccgtgtgtccgggtttgttacaattgaagcagagttcgggtttttctcccaacctcttgggctgttctggcagagctggctgaactgattgagctggaatctttagtgaactcggagtagggttgagactgtgctgctcactgttgttgtgactgccattatggtggttcttgttgaagctacccgggtggtagggacggtgctgtcggataatcatgg

SEQ ID NO: 77420 - DNA, 254 bp, Oryza sativa
  unsure (1)..(254): unsure at all n locations
ccacaaacagacactcccattgaaagccgatagcttcaaaacattctaagtggtcccttttactgctaaccaccactgagattcccagattcccctgtaagacaaagaanaaaggttctttatctaccctacagaananaactatgttacactntcacgagatgctcacatggcgcacacgatttatagttctaaattggtagtagtcgttaagtcatactccctanctcctcccaacttcctgcctgctcaca

SEQ ID NO: 77421 - DNA, 435 bp, Oryza sativa
  unsure (1)..(435): unsure at all n locations
agcttatagaaaatgttcccattctcttanctatcctctgatgctggttccaaccgctacctgagccctgactctaanccgtaggtcctctaacggagccggtttcattggtgataaaaaaaaaaacatgaaaggatcggcaagaagctcgttgttgtcattgtcgccattgcatgtaagccatggctactgccttcccctcttctttccttagctagagggtaaaaacgactcctacggctagctagtaggggactaagatttccccaaatctcagtgacctaaaatctatcatttccctaagcaataggtaccataaactgaactacaaaccttaagatatcccatgatactaccttggaaggcctaccctacaccatgcactctccagattgaaaaactcaaaccgttctggtttgtataattaatcgcatc

SEQ ID NO: 77422 - DNA, 407 bp, Oryza sativa
  unsure (1)..(407): unsure at all n locations
ttttctttngtccgngcgatgaagctagctcgtgatttcttcttcttcatgttttcgggagtaattaattaacgtgttcttgtgtagaaatatatgtgaaggattttctgtttgatcagggcatgtcttggaggagtttgcagttcataactttttttttttggtaaaaaaaaaagttgagttgttggtggcaagtggcaacgggggtctctctgtagaattgttgtgtaatttgtatcaatatatattggatatagtaacaacggatatttatttgagattcattgcatcttacaggcttatgggttagttactttgtattgatttctttgaataatagtggtttatgtgacccaactgttaacgataaaatttgattttttccatcaacaccaacatanaccact

SEQ ID NO: 77423 - DNA, 437 bp, Oryza sativa
  unsure (1)..(437): unsure at all n locations
taatccatatcgtgaggcanaggggttcatacaagtatacactatatgttcagccgatatgatctntatttatacccggtgggtcaatacgttctgctaggggccgctgttgacgcgtggaccgaaaaggagttttcgggttaaagccgagtatatatgaacctacagagttgcacgcttaatgggccggaataaggggattggatggagatccaatatgtgcttaattcggatagggatccgaataggagtcctacgggccttggaggcccgagtgatggatcctatatattcgtgaggggtgtgaccggcggaggcattgcatcacgtgagaaaccctagccgtcacttccctccccgagcaaaaccctagccgcgcgctagtgctagcacatctgcgcgtggcgttccgtccctgtacgtgtggataccggtag

SEQ ID NO: 77424 - DNA, 444 bp, Oryza sativa
  unsure (1)..(444): unsure at all n locations
agctntgaccatccattatttcttccaaatctttctgttctttccaggggatggtcctaattcatttgcgcaccagctagaaatgaatcaccaatattatatagaaaattagttcaaatatagtggctacttttgttgtgctcaactgcttttgcaatataataccatataagtttagcagttaggtacttaagggcaaaagatctatttacaacttatttgcttttagcagataactcacaaaatttgtcaattggcaagcatatatagctagacttcctttctatatataagttacaaccacttgggctgttttctccaggattacaacagttacacacactttaagattgaatggagcatcagctgaaaataactgcaaatggtaaggtctcttgtgtcatatattaacagttcttacaaagagtctgtttaaatntattt

SEQ ID NO: 77425 - DNA, 443 bp, Oryza sativa
  unsure (1)..(443): unsure at all n locations
acgcggagcctgctcccttggccgtgattggtgaatgggctgttagcaagctcgaagaagagggttcgccaagcacatagaagacggngttattggcaagctctggtgagggttgatggatgcggatcgacccaactgtatcttgatctggctacggctagttgaaatttggaggtatctctcctccccgatgtcgacgagagtacgagaccaaggtgtggttcttcaattctctcctccatgaagcctttgccgtcccctcctacccaagctccaccactaccgccgtcggcactctcctcgtcaagctcaaggagctcgtagatggcttcctatccaagcgccactaccaccctagacccagcacccncacccnctcccnctccttgccgaggttaaagagacgggtgccggcagcacgggcttgatcccaagatgaactc

SEQ ID NO: 77426 - DNA, 439 bp, Oryza sativa
  unsure (1)..(439): unsure at all n locations
agcttaattatataattcgcanatctccatataacagcattaaacttcggatgatcatatcctggtcatacgagctccgaatcgacccgttcaagtctcttaatgtttgttataacctaaagaaccctgtgctttgtttttatgtattgttattgcttctttataggcttgtagctttgtttgtgtgcttcgcgtagcttctgtcgttccggaggttcccgaagcgtggttcgtggtcgtcgccgaaggttcggaaggccgttctctctgagcaaggcaagtcacatcatccttgaacatattgaatcccagtttgtaaaattatgttgatttaaattattgcattaccgctttatttaaattcccgcgttatcactgttttatctagccatgcctatttacctttggtatgaccctattattgctattgttattatta

SEQ ID NO: 77427 - DNA, 293 bp, Oryza sativa
  unsure (1)..(293): unsure at all n locations
tacttcgaagttttggcagaaattacaagtagagatgggtacccgtttgaatttcagtaccgcttatcacccgcaaacagatggtcagacggaaagagtaaaccaaattttagaagatatgttgagagcctgtgttctagattntggtggaagttgggataagaatttgccgtacgcggaattctcatataacaacagttatcaagctagtatgcaaatggctccgtatgaagcattatatggccganagtgccgtacgccgctcctttgggatcaaaccggtgaacgtcaag

SEQ ID NO: 77428 - DNA, 426 bp, Oryza sativa
  unsure (1)..(426): unsure at all n locations
agctntccctagacactgtntctcactagtaaatcctctctatcttggcctatcatttgcttggtgtccttggataaaccggaggaagatctgaccacacacgttccctaggattcgatacccttggaatacttcgtaggggaagtgctacatcggtatatccgtgcgcttgtggattttatctgtaaccgtattaaataccaacatatacaagagggattgtgtacgtatggaaagaggagtcaaatttaggatccgaattcgggaagattaatagagataaggaaaggaataagttggatacttgcaagagagtgtttcctacatggttaggagttctaagttgtgttagattcgtgggctttgcacagcctacctcatgtataaatagagggggagggtgtggcctcctggtatcggttttag

SEQ ID NO: 77429 - DNA, 436 bp, Oryza sativa
  unsure (1)..(436): unsure at all n locations
agcttgtccttaaatgctcaaaccaagctacttgctttagactgtataatcttatactgcataatcttgtacttgatactgtatgatagttttggcgtagcctgtaacacaggacacatattggttacctgtacctgtatatgttgaaacaaggtattgtgccgctgtttgtatttttacgaatgggaatgatgttttactttatctttcctgtcaatcacttacgaatgggaatgatgttttgctttatctttcctgtcaatcacttagaaactccgaagacagaaatttattggtgtccttgtttacgtcactgttagcagaaaaattgtcgataacaagaactccatcttaaacttacctgcttgctctcaattttgaagtggatactacaccagtacacctcataaaacatncgtaaattatagctatcgat

SEQ ID NO: 77430 - DNA, 458 bp, Oryza sativa
  unsure (1)..(458): unsure at all n locations
tcatgcactccttcagagcagatgaaatgtgaaattntggttttaagtgtctttctgctgtatcctctgatcttttcgaggcgtctctcagtgggtcaagaatgcataattttttttctccatatcaaatgcgtatagagaatagtgcagtggttgaagtagtggaataaatatctgcaaattaatattgacattgcaaaagttagtggcctgaacatttgcacttgatgtactgaatttttcaagatgctgttaattatcaaaccaggtggcaactaggtacgtcatatggtatcagggagtcatctttgaatgaggggagatgatcctctgggttccactggtcatcaccagctgttgcaaacatctacagcgccatattgtgttaaaacacaccatatttaagaattaanatagtctagagtaattggaagcacttactgcanaatcttgattaa

SEQ ID NO: 77431 - DNA, 437 bp, Oryza sativa
agcttggagcatatataagaaagatttgcctctgtatattgccctgtggtatcagaaatggctagaccaagaacagagcaggttctatacataacgggtatagctagcaacttacttgaacatcccttcataatttttggtccgtctttctttgttattagaaaaaggcatgagaggtcgttctctgtagcttctcccaatgcttacagacccctctgacaatgtttttgtatactttgactgtgagtaggtttagttctaattcatgggaataaattgattttttctaccaggagtaattctggctagcatctcaatgatgtcatgtggcgtgaagagtttcatgcagctgcaaacattttctttggacagcattgggttctctcaattttgggtttggatgtgtgctaaattattacaggtccaatcttttggaa

SEQ ID NO: 77432 - DNA, 433 bp, Oryza sativa
  unsure (1)..(433): unsure at all n locations
tctctcatggtcttgatataaatgttcattactggatctgcaaatggaaagaaatagagtattggttcaatatgcaggacaaaattgacttaaaataaaaacatagcatgctatattagcatctaccaagaatatccttctgcttctctaatacatcctgcatggtagaaaagaatattttgcatcagagttttgatgtttcataatgatcggtataatgagagggaataatacaagcctctttaagacaagtactcacagcatgtgcaggaggtattgctcttattgcagttaggatatctgcaataatagtcaaccacttgaattaataatagccacgaagtatcaattcttcaattgaacaacatcaaagaagcttctaagttctagcttttaccagcttgaagttcagaanaccaactgattcaaagta

SEQ ID NO: 77433 - DNA, 437 bp, Oryza sativa
agcttcagccaacatatcaaaacaagaagtaatgatgggttggttggctagttacatgattcagccaacaagtcaaaagtgagagcacttaaatgctttcttgggaagggctgattcacttcaaaaagttgcaaaagggttggctgttggtggaggcagcaataaatgcatttgggggtggctgatgtggtgatgaagatgctgcttggtgtggtggacgaaatttggtggggttggaggtggatttcgaggtgaatatggtggtgatggtggcaccgggatgaacataaatgaagtgatggtggaagtgtttgcggtgaccaaatcgtgagcagaactcgaaactctaaaggactaaactactagaaccagcaactcagccaatcgatgcaattcaaaactcaccaagcaaagactaagtagaacagcataggctc

SEQ ID NO: 77434 - DNA, 372 bp, Oryza sativa
  unsure (1)..(372): unsure at all n locations
gtcttgtatgcttacacctggtcagcttgtttttaaagagcagcaccctgcagcctatagaccttgtttctaggcaagacagctatagcacgtgaatgcttgctcaccgtgttgcatctctggcctaaacttacagccttacttctgagcagcagtcatcaactagaaactaataatactatttgtataaaaaggattntctatgacatctaaagccacatactagttacatgggactataattcaactacccaagaaataatacaaaagaacaaggctgacgcgtagtgtgcatgcccttggtgtgacctgatcttggtgaatgacaagggagatagtgcgactacattaacatgcatgtgatatgaatct

SEQ ID NO: 77435 - DNA, 439 bp, Oryza sativa
  unsure (1)..(439): unsure at all n locations
agcttcgattgagtgggtaagtacctcattgttgagatttgttcttttactattgaattcttatataatactcacttgatcgaactatattgtgacaacataattatgacgtccaaaaccgtgtgtaaaaaacaataatctgcactacctccgatctcgaaatgatggcgtcctaaattgtgtgtagtcacatgtcaaaaaaatttgaagtcattaatagatgcaacaatatcatgattaaattgtgaaaattatattaagagaattttaatgaaaaactcatcgatgttaaaaacatccatcaccactttataaatggaggtagcaacaaaataattggcaaagtataaaacttctgttcactacaccaactaagaatacacataattatatttggaaaaaaaagtatgaattaccccnctgaacgaattaccgagtt

SEQ ID NO: 77436 - DNA, 374 bp, Oryza sativa
gactcttgtaggtgcctaagtggagttggagttgctttgttggtaaggtgcaatgatgctaggcaataatggcatgttgctagccgtgtgcatgaattggcatctctgtggctttggttattggtagtcgtgggaagttgaagttacttgatcctttgcgatgggcttgacaatgatgcccttttgttgtgaagccagagctgctatgttgctgctggtggaagcccttataatgatgatacttttgagatgtggaggattgtgttgttatgtggagactcggcaacgtgcccgcgtgggactctgcattgtatttgttggtgggctgggtggggttgggctgtgcttgaatgcgtgctctactcgcgaagttg

SEQ ID NO: 77437 - DNA, 449 bp, Oryza sativa
  unsure (1)..(449): unsure at all n locations
agctngaaggagcaagagacgaagtcgccaatgtcgctacaccactcgtccaagctatgttccttaataacagtggtccgagtgcacttgacgcaaccgaaatctttgacaagctgagagttgcaccggatgtatatttcaagaatatcaagaaagctggaagtatgggagctagtatggcattggcgatgaccaaatccttgtacccgaggattgaaattgataccattgatggctttgcagacgggacaagtgaagaagctgctcttgatcttatcagtaatgctcaaagtgcggctgacaagattgcaagtgatgttgtagagcaattccgcaacaacgaccttcagccgagcaataataactctgatgatgaaaggactgattctgactgagtgtaaatgtagcaaatggaggctcaatntgtacaatactggtgtatttatgct

SEQ ID NO: 77438 - DNA, 446 bp, Oryza sativa
  unsure (1)..(446): unsure at all n locations
tgntcccttatagtgagagcaggggtgggtacatgatctaaattccaagaccaaaatatccttaaagtagtactccattggttctgttggacaataactcattactcactcaaaattccctcttgacccatgcacatggtaatgttagaagatagaaatcactcgattaagttatatcattaataatcattgttagcacttgattttttttttggcagttcacctcaaataatttcttctggtgattttgattccacatgagttcttataatcttttgtgatacatcaatttgtttaacaaaataatgccaacacgtatatataacaaatcgatatttcattttgtaattgtcaaattttttggtgaatgaagatatnaccgtcttgtaaatgtagatatactatattngaaattcattgtatgtagatatatagatcaacagttc

SEQ ID NO: 77439 - DNA, 439 bp, Oryza sativa
  unsure (1)..(439): unsure at all n locations
agcttgtcaaattgatgctgcggctttcgcctatgttgtcccttcgaccttcgccgcttgcctccgtcccatgcctntgcctatctcctcggttttggtaggcctggtcgaaggtcctcgtggtatacctccaacaagcccctcacggcaagggtgagtagggagcttcggccgaggctgtgcaaatcgtgtggtataccatgaggcgcctccttccggccgatgttcctgccgaaacctatattttgtacttgcgaaaaagtctggcgttttgcattaacagatctggtgatcaatgttctttcctttcctcgcttattattggtgaaatggctgaatatgttgggattctcgtgaacagtaatgggctagatgagccggtctgccgttactttcggcctttcactgttcggcctgccttaacgtggcagtcccttac

SEQ ID NO: 77440 - DNA, 150 bp, Oryza sativa
  unsure (1)..(150): unsure at all n locations
atcattctaacatttctcatattcatattaatattaatgaatctagatatatatctatctatattcattaccatcaatataaatgtggaaaatgctagaatgatnntataatgtgaacggagagagtatagtttattcggataatcatta

SEQ ID NO: 77441 - DNA, 438 bp, Oryza sativa
agcttgatcatgactacctttccatggctgtacttgtacaagaaattgtcaatgcagactatgcctttgtcattcatactactaacccatcatcgggagattcgtctgagatatatgctgaagtggtgaaagggcttggagaaacacttgtaggagcctatcctggtcgcgccatgagctttgtatgtaagaaaaacgaccttgactctcccaaggtaaaagatttcttattaccacttgaaattgtatgttaaggtctacctgagctaaatgcattccatttgataggtactgggtttcccaagcaagccaattggtctcttcataaagagatcaatcatctttcgttcagattccaacggtgaggatttagaagggtatgctggagcaggactgtatgataggttagtgaaagtccatcataatttttgtagttcg

SEQ ID NO: 77442 - DNA, 426 bp, Oryza sativa
agctttcgggcccacggtgactggtctgaaatacacaatagaggtaatgagcttcaggataggattgcaacttgaatctagaaaagaacatatggaacagatgaaatatgattgtaacacgctagaggaaacagagttttgatatccttacttttcactcgtctccatgtctccatagcctgattccattttcatttcagctgaattaatgaatggtagctctggtatatctttgaaccgtaccaagaacccaagtcatcttcaacagcaacaagatatccgtccgagtccctgaagagcagcctaacagacttttgtcccttgtacaataagatcatatgatatccaccagctggtgttaccgcagcattgaggcacgtgaatggagaagtctgcaaattgtactcatgaatgcttctcattaaa

SEQ ID NO: 77443 - DNA, 407 bp, Oryza sativa
  unsure (1)..(407): unsure at all n locations
atatcaatgatttgtgtaagtctcagatgctttntgatcatgatacatagttttcacctcacatcaaatgtctccttgagctgcatggcacaatttgatcagtcacattgtttctgttgcattctatggcgcttggacagtttaacccttattagttctctctttatcatttttcatccttctgttctttaagagtaaatttgacataacccctaggtattatgacttaagttgtacaaaaccacggaggtttttgacacatgccacataaccctagatattatggttacaaagtttcacaaaaccatagaattgagaagatctctgggagaaggagagatgttagagtgggaggagctgcaaaacttgcttggtgatatacagttaaatatagagagagattatat

SEQ ID NO: 77444 - DNA, 445 bp, Oryza sativa
  unsure (1)..(445): unsure at all n locations
agcttctaaaatagatcctcgntacctcaatagagcattcttgctgcagcaaagaaggcaaagtttaacaatggggaccaaacctgttcaagtaagagggtggccgttcgaaaaaacaatggggaccaaacaatgcaagcgtgtttgatgaattttaatctcagtcagcttttccaaaccaactgacaacgcaagcagggagtcatcgtcaacttttcctttcgctagttccctgggccgggctttattctggttggtcaacaaacccaaacatttgcacacgagactgatgtgagatgcaagctacatggcatgagacaaccgctaacctccctacaattcaaccagataatgtagattatgcgcataaccagtcagtaaaccagcgcgaacagtatgttaaatggactagcacctggcatttgacgacccncaaatgcccaat

SEQ ID NO: 77445 - DNA, 467 bp, Oryza sativa
  unsure (1)..(467): unsure at all n locations
taggttaatatcggaccanacggattcagttcatgatctgttagaaaaattcaacaaatataattgaaacaggtccgacatttccaatcagctaaatccactgaataacaacctggattatcaactttgcagctggaaaacgcgtaatccaatctgagtttgattatagcgtaatggattaagtaggaaaaggtcaagtttcatctagttctccactcctagcttcttgcatcttgaatacaggttccctcagtaagacatccctataaaggcacagacttagtgacttatcgcaagttcacgtaaaggcacagactgcagcaatcaactggaatattgaactgccaggaaaatgtaacttctagtgcctactaaattattcatgagtatttttctttgacagacagagtgtattctattggaacaattcaattcatttgtctctgcaggaatcatacagaagttgg

SEQ ID NO: 77446 - DNA, 446 bp, Oryza sativa
agcttcaatctcatatgacacaaccacatattacatttgactggtgactcaccatctttccagcacaattggtctctcttttcaaatcaccataccacccgaactgatttattttcctttttattatgatatttgcacctgtgccatgccaaaaaaaaaaaaacatggattccctaaaaaaaaagcatggataaaaatatatacataaccaacccacactcacacaggtatattaaccatcacatttactatcggatcggctctacaatttcgagggcctaagtaaatttgatagttcgacactataggctcgtaaggcttttctttttaactgtaacataaactacacatgtgtcacaaccgccagatcgaggacaaacccacggacatgatgcccgagatattcaatggctcaatgcctcaactgaaagaatctaaatactcaa

SEQ ID NO: 77447 - DNA, 406 bp, Oryza sativa
  unsure (1)..(406): unsure at all n locations
ttggctgttgtgcgagacaaatatgattgtaggaaagatattttggaccgatatgcttttatcactcctgtagtcaaaccgaagaaaagggaaaggagaaacactatttgcgttcagttcgacgtttcgctttttttgtgattgatccaatataaaaggaaagttttccttgggctagatccgatatgacaaataaataagtaacatacccccgctctcaaaaacaagttgcttgaaatacgaacattcaaaaagagttaattttaaccataaaaaccacttcaaatatctttttgggtatatgaaaatgatatattcaactttatcctaacaagagctctcataatattacacttatgcaaaaaataagaacaaactanataacttctttatgaataatgatata

SEQ ID NO: 77448 - DNA, 434 bp, Oryza sativa
  unsure (1)..(434): unsure at all n locations
agcttaagaatatcgaatatgcgcttatattttattatctaaagttttactggtattggttgtcgtaggcctttagcatgtgtagatagtgattgattgaagaatgcaaaagttcagacgacttccacctgttctgctgcagcttgtttgatcactatcatgcatccctgttggctttcgtatggattgcgtttgccctctgaaactaggaagcttaatgtgtgttaccctgttactgtntgagtagttggataatgaatcccatggtagcactatttgcactccggtttacacatagtgattaaaatggaatntctccaaaactagatctggcccattgcaataagtagaattcacattgaacattaaaactttgcagctaagtttgactatgggacatgtctaatggatcttctaccctttatctgctttac

SEQ ID NO: 77449 - DNA, 454 bp, Oryza sativa
ggttggtgtggtagggtggttgcaagcaagcaagcaaagcagactactactcctatattactatttactcatatacactccatgcatgtgtatgcacttaattatgcaggcattcaacgcattattagtggcttcatgactactccaggtttgcaggatttggtgaggaaaatgggtggccatcactgcagcggggtgccactgctgctgccacggctactattgatgatatatactccattagttccattttaagtgttgttataattaagtttttttttctaattttaatcgttcggcttatttaatttcttttttaaaaaaataaaaacataagtcacgtataaagtaaaatttatgttttatcatgtaataacaataaaaatatcaatctaaaaaatttcaaataaaacggacgatcaaagttgaacatggaaactcatgactacgctta

SEQ ID NO: 77450 - DNA, 440 bp, Oryza sativa
  unsure (1)..(440): unsure at all n locations
tggcgtgcaagcaacactttctcggngcatagactcaattctttgtcctgactagcttcgatgtcctttttcattctctctgaggcagattcatcatcatccatgtttgacctgtcgaacccatgggatggcactccgagtagatactttatctgttctttggtctgtcccataatgcctgcatcaacagaaacataatccgtacaactacaaacttgagaaaactatcaatatcacataaatttaatctataagtgggcactagccctatacaaaacaatcacatgacattatagccttgtatcaactattaaaaattactacatatcagaagtacccanaatgaatattntttaaanttttttttggataatctgtattttagaaaaatgaaaaaggagtgtaaaaaagatcatcaccatgagccctctcgtcgagct

SEQ ID NO: 77451 - DNA, 443 bp, Oryza sativa
  unsure (1)..(443): unsure at all n locations
ggatccttaagcaccgcngctgcaacttgcttgtggaccccttctgctctaattataatctctaacgtcgaaagagaaaagatcggctaacacctacagtaattatttaaagggagttagagctaaatagatatagccgatctaaattcttgtgtcaaacggaaacttactggtatagcaggagcagctggttgttcttcttcttcaatatgatggctctctgcatccgatggagtttggccactgtcgcgaccgggagaatagccttttcccgaacgctagtgtattaatccccgtcccaggaaaagccggcgtacaccacacaaacatgatataaaagacacatctntattatatcgataatatctacactattacaaaggcgcttcaggcctggtaataacaaataaacatgcacggactagcgggcctatggctccatc

SEQ ID NO: 77452 - DNA, 460 bp, Oryza sativa
  unsure (1)..(460): unsure at all n locations
tcagagtcgccgcccttagctctatcgacttcttattttgtttgcttgcctagcaccgcgcttagggttgatgcttgtgggctagtccgcggtcgatatcatgtgtgagtggtatgacagcctttattaggagttgtgtgcctctttnttagtgttttaatcaagattaagataattgcacttaatcttataagaaagattaatttccgagccgnctggtttcttcctttctcttatttctacctatcctcctccagatggggaagacaaagaattatccccgtgactccaacgacgccagtggcagcgaagagcagaccgatggagctcatgtcagtggtgcatctggcagcagatcatctccaccgcccgaaaacccaacagtcactcaaatgatgacaatgatgatgcaacagatgcagcaacattaccatcatatgtttgcagaggcgcaacagat

SEQ ID NO: 77453 - DNA, 442 bp, Oryza sativa
  unsure (1)..(442): unsure at all n locations
agctngtcattcanagcagtagcacactgctggtggtgttgtttcctccacttgaaggtggtaggtttgtccttgcggagcgatatataccactcaagcatgaactgagtggcatcatcactccaagtgatatacttttcacgagagccaccttccttgctattatcttcagtacgatttcccatactgcatacatcataggagaattgtaagtaaaacacttcatatgaacaatggtagtcagttaatacaaaaaacaaagattgtaagcaatatacgttggtaactcattcgctggtcataacatcgtggacatctatgttgtttctatcattccacatctgattggcaatatcgtcacgcttggctgcccactcacgtacatcagcccctttgtcagtgacacggttactactccttggtaggcgagcataccacgtat

SEQ ID NO: 77454 - DNA, 311 bp, Oryza sativa
  unsure (1)..(311): unsure at all n locations
tgtgaactcaagatggatccaatcttgcataggattccaaacaccacagcctctgccatccagtcctcaaatcttgcagtcaaatatagctggctcaattacagttattatcagtggacctgaaaagtgggattggacgtgaaacatcgatcatcatatgtacaaactntgcactggtattgctgaanagttgtgttaaatcgaanacaaatgattgtgtgagctntaaacaaaatatccatctagcactgaaataaanatgtaatatagacaccaatctaattgtgatatagccgaacacncttcttatg

SEQ ID NO: 77455 - DNA, 409 bp, Oryza sativa
  unsure (1)..(409): unsure at all n locations
agctntggcgagattcggaacacggcggatgagttcgccgtcgctgatatgccgcagccgccgccgtcggtgtgcacgaggagcgtcacctccgtcgcgctcccgacgcatggagatggcggcggctgctgccgcgtgctgctctccccattcgacgcgtactgggtcgcgctcctgctcgtccgccctcaccaccattcggagacgttgtccacgcactcagggactccctcgaggcgttgctcccggcgttctaccgcttcgccggtgcgctggtctactcgccggaggaggaggaggaggatgaggaggggtctctgtccatcgtcgtggaggccggcggcggcgtggcattcttggaggccgaggcgttcgtggcatctgcggtgcgctcgccgcgggggatgat

SEQ ID NO: 77456 - DNA, 398 bp, Oryza sativa
  unsure (1)..(398): unsure at all n locations
agacaggcgtctcttctatgtattttataactcggtgttgaagcagttttgtggtgattggaatcagcttaaataggatgacttttaataaaatgaggagcagccataagaggacagatttgaagaatctcaactatatctaaacattattagaaagaaacacatacattaactcagtaagtttctttcgtatttttaaaaaagttacatgtccttgcgtattgtacactattgcgcccatcatagactgttttgtgattgtaaatatgcaacttcnggctcgttcccccctttggatatagccaagattggataataataagcgagatctaatgttcanaattcaaattataagagatatngagcattttgtanacaaaaattgcttttgaaattac

SEQ ID NO: 77457 - DNA, 442 bp, Oryza sativa
agcttgccaccgatccgccaccaatccgcgaggttgcaactcgcgaggaagccgtggtgtagactatcgagcatgttgagttgtgatccaaattcatttgcatttaataaaggctatcgtcatctcttttagggttccaccatatatatgcctcttgtatgccgccgtgcggcgatgtaatctcacctcagatatagtgaagatattttgctggctgacgctcgtggttttttctctctcctgttttgggagggttttccacgttaaatctcgtgtcttctgtgattgatctattgttctttatcatttgttcgcttatcgtttcacaacaagtggtatcagagcttgttcccacattatggtttcgcgatggcgtcgatgaagtatgatctaccgctgctagactacaagacgagattcttgctgtggcaagtcaagatgc

SEQ ID NO: 77458 - DNA, 443 bp, Oryza sativa
agcttaagcgtagaaacgacgaagatgttcgatgttccaagagttgtcgacgagtgtaccgtcttcgcgcttgagtcgataggaacctggccgggtgactgcagagatgataaatggcccttcccatagaggagataacttgtgccgatctcgtgtagtttgaattttcctcaaaacgaggtcgccgactagaaaggcacgggatcgaacattgcgattatgataacgtcgcaacccttgtaagtatcgagccgactgaatcaaagctgcttcgcggacttcttccagtcggtgcaagtcatccactcggtcctcctcgtagcgttcttcgcggaaattacgaaagcgcaaagactcgaattcgacttcactcggcaacattgcttctgccccatagacaaggaaaaaaggtgactggcctgtggcccgactgggtgtagtac

SEQ ID NO: 77459 - DNA, 357 bp, Oryza sativa
  unsure (1)..(357): unsure at all n locations
acacacacttatcggggttcagctttatgcgggcggagcggaggttctcaaaagtttccgctagatctaaaagtaaagtttcttggttgcgcgtttttacaaccaagtcatcgacataagcctcaacattacgtcctatttggctacccaaagaaattcgagtagtacgttgaaaagtaggacctgcattctttaacccgaagggcattgatgtataacaataggttcctacggnggtaatgaacgcagttntttcctcatcctccctagccatgcgaatctgatggtaaccagagtatgcatctagaaaacgcanaaggtcgcaccccgcagtggagtcgacgatctgatctatgc

SEQ ID NO: 77460 - DNA, 431 bp, Oryza sativa
  unsure (1)..(431): unsure at all n locations
agcttagaggccttcactgggccctactgtattgtttgggtacatttgtgaaaatttacaccttttgtacctatactttgagtaatagcaaaaattataaccaaagtaggagtatgacaaagctgaatctttactgaaaattaaacaacattgtaggaatttttacatatcaagtatatatttatgttaataagactttgtggaatttatgccctttattggtgtctattagaaaaaactagaaaatggacaattctagttgcaatattcggttgtattttctccttcttcttaaatacaatccacattattacatcatcacaaagtcaaaaaatgaatagtattatcctacctaggtggtcaaggtgcaaaaagcccncacacattaagatacatggcttggttactttgctactattttcaatcttaac

SEQ ID NO: 77461 - DNA, 427 bp, Oryza sativa
  unsure (1)..(427): unsure at all n locations
actcagcttccactagacttctgtattctgtcgcatcaactatcgttcctgcactttccttgctcagctttagacgtggttccatcggtgttgcacaggggttgcagccggtgagcccagccttctccacaatacgcgacgcatacgctgcttgctttaaagtgatgattccagcttcttgatgtacctcgatcccaagataaaaactcaaaggaccaagatcactcatcttaaattcagccttcatctgctctntgaatcccttgatcatgccactgtcacccccgacaattaccagatcatccacatacacaccgacgagcagtcgcccactgccatcgccgcgcgcgtacagcccatgctccaacgggctctgcttgaagccaagtttcttcagtgtgcagtctagcttggtgttccaagctct

SEQ ID NO: 77462 - DNA, 434 bp, Oryza sativa
  unsure (1)..(434): unsure at all n locations
agcttgaactgaggaatttgtgttaatggcaaaggtaaacactcaaagcctcgctacagtacgctctactagtagtagagaggtagagagtaaccaatcatggttcatcgttcctctttcatctcaactaatgtttagggcccgtttagttccaaaaagtttttcccaaaaacatcacatcgaatctttagacacatgcatgagtattaaatatagataaaaagaaaaactaattgtacagttatgggggaaatcgcgagacgaatcttttaatcctaattagtccgtgattagtcataagtgctacagtaacccacatgtgctaatgacggcttaattagtcttaatagattcgtctcgcggtttcccggcgagttctgaaattagttttntcattcgtgtccaaaaaccccttccgacatccggtcaaacgt

SEQ ID NO: 77463 - DNA, 399 bp, Oryza sativa
  unsure (1)..(399): unsure at all n locations
ctaatacattgtactattcacatatgcattaagataacacatagtaagtacaagcaatagcaatgatgcagaaagcctcttgaggcagcatgaaaattaacattctggacagcaacaacaaagttgtttgctccatctcagtaaaaaaaagttgtttgctccatgaagaacagataaaacatggacttgatgttaattagctggatttgggtggaaaccagggtattgggtggtgatataaacacctctagagaactctagatgcatttctaccaaacggcccctcactagcacctttggtatatgtattagtgggctgttaattacagggtcttggatttccttgtaagggcttgcccgtctcccagaacttctcgcctgcttggnctatcaatcata

SEQ ID NO: 77464 - DNA, 421 bp, Oryza sativa
  unsure (1)..(421): unsure at all n locations
agctnttgccctcctatcaaaagaaaaactttaaacgttaaatatattggntatgtgaaattactgcgtttccaaaaagaagaagacagacacatgaactcagtggatattactatttggagggttgctaagattcatgttactgaaattgctactagtcggaatttcaaccatcttcaacctagcactaaatttagggatgcatgcacgaggactgtcaattgcacaaatcttaatgtgatttgagccatccaaaaataactataatttgtggatatttaggacattcacggtgcggggacgtggcaagggctctcaactcgtcacgttagatctgtagctagctccagctcgggctttgacgccatacccccacagaggcacttctgcctattgggaataaagaggggagttgcttatc

SEQ ID NO: 77465 - DNA, 409 bp, Oryza sativa
  unsure (1)..(409): unsure at all n locations
tttcttctctaccagcggcagcggcggctggtatggatgaggatatcgccaccagatcgccatggagacgctggcgagcgccatgcggcgggagaaccgccgnttcaagcccccctccttcttctccgcctncgcctccgccgccctcttctcggggagggtccccctcgtcatggccttcctctcctgcctcgcgtggctctacgtcgccggccggtacgtacgcgcgcccgcgcgctcagatccggngggaatttccgtggagttttctgattggttcgttgattggattttttttttgcaggctgtggcaggacgcgcagacgcggatgatcctgtctggtctcctcgagaagagctccggcaatgtgcggatctctccccctctccnacccacttctcgtttttt

SEQ ID NO: 77466 - DNA, 440 bp, Oryza sativa
agcttgttgatgagttgaaggaggtcataatggctgcaaacaatctgttgcaggagtatgacaacgagaggaagacacgtgaactcactgaggaggtgtgcaccaagctggtgagggagttagaggaacacaaggccgagattgaaggcctgaagcaagactctctgaaactgcgtgcagaggtggatgaggacagaaaattgctgcacatggctgaagtgtggcgtgaagagcgtgtgcagatgaaacttgttgatgctaaactcacccttgaagccaaatacgaagagttgagcaaactgcaactagatgttgaggcaatcatcgcctctttcagtgacaccaagggagactataccatagtacaaacagcaaaaaacatcttacagtcaattgaatcaaccagggaacaggagatcaaattcatgtatgaaccacca

SEQ ID NO: 77467 - DNA, 445 bp, Oryza sativa
  unsure (1)..(445): unsure at all n locations
tcttggttggcagcttcaaagtcacctgaactgtggcggttcgtggacatgacacgccacaaggtgattttctcaaagagaactggcatactgtgcgcgatggcaaaagcagcgatagatcgctccgatggacagattgagtcattctgggcccagaagtttgtcactggtgaactcttggattatattgtgagaaggtattgtttcccaaatactatattcggttctgggtttgaggggttgagcttttagcgatttacatggaccatgttgagatatcagaattaagtctcgtagcttaatatataaactgcttgcatatgtacagtatgatgttcaattaggctntatttatcactgtcaagttagttttgcatgttcatttcttgcaaaaagaaaaaaagggtttagtgtttatcagtggcggagccacggaattaaacct

SEQ ID NO: 77468 - DNA, 410 bp, Oryza sativa
  unsure (1)..(410): unsure at all n locations
agcttaagatgttaagaagctggcttgcgataatctgganaagtttgagttttctaatttctgctttctaattcattttttctagattctacaactttctattactacaatctaaattgtttaggagagcttttcacattcggagattgtagaaaaagctacatctatactaatataaaaatgagtagtttgccctccaatcatacgtgccaaatcagagaaaactgggcccacgtgtgaacgcaccgaatccccatccccgccgctgtaaatcccttcgcgcactgataccctggcgcagcaaaaaatcgtttcccctgaaatcacgctgccgatagcttcctcttccccttgatatcgctctccacaaaatcgattagcctacacacgatttcaccatccacaaaatc

SEQ ID NO: 77469 - DNA, 419 bp, Oryza sativa
  unsure (1)..(419): unsure at all n locations
tttggttgcagaaatctgcagtggatgtgagcaatgtgctgttcaagaacatcaggggcacaagtgcatcagaggaggccatcatgctgcattgcagcagcagtgtaccttgccatggcataaccttggagaatgtcaatctcactgtcaagggaggtagcagtaatgccaagagcacctgccagaacgcagaatggaagaaatccgggagtgtcagtccacagccatgtggtttcaggaactgacatgaaacatgaacatccatgtggtttcaggaattgatctgaaacatgaacatccttggaccttggaagatgtagagaagtaggagtattntacatcgtggagctagagagacaggtgtatatattcagaagaacatgtacaggaggaatacatgacatgtacagaagtgtata

SEQ ID NO: 77470 - DNA, 430 bp, Oryza sativa
  unsure (1)..(430): unsure at all n locations
agcttgcgtgtggngaggtgggatgtgtgtgtgtgtacacgccgagtggtggtgcgcgctatatagctaagctgatgggcttcctttggctttgggttggaaaaggagcacgtgaaatgcgagcgcgggaagggagagcgacgcgcggcggcgagggcgagggaggagtantacaattgtcgcttctctccttggaacctcgtcgactggtttatctatctatctatttttagagggactaaaacacgccattagctcctttggtttatcttcctgtggtttctaaaattcgtctaggcctctctctctctctgnggatcctttgtttctattttattatttttgcttaatttgcaagagaaaaaaatatcttttctttattgattttttttggttgtgggatactatgcataggattgctagggcacga

SEQ ID NO: 77471 - DNA, 457 bp, Oryza sativa
  unsure (1)..(457): unsure at all n locations
tgagtcgtcgaaaggccgagccgaggnggtcggcgatgctctcgggatggcggtcgcacttgaggatgagcttggagacggccgggaagcaggcgaggatccctgagagtgcagtgtggagcggngccctccaagcatccccgtcgctatcccacggtcctgtagttcaacagctgttaaccgtcgaggattgatgaaggggaggatagcggngcaggctggagtagtgcagacagttggtgaggttggctggaccggagggagagaggaaaaggagaggttttagactaataggtgggtcctacatcaatttttacgctggatacccacattggtaaaagtggcaaatagttaagaagccaccaccttagaagggaaaaaaattaaggcanatctaataggggtatttgaataattgataaacctaatagtatgaaatagttaaatttcccattat

SEQ ID NO: 77472 - DNA, 438 bp, Oryza sativa
agcttcctgtatcaaaagcgaaccaagacgtatacaatacgaagcacaaagctgagtttaagtagggaggttgctgtatcggtgtatcctctttcttacacgtgaaatcagatgaacaaaatggaacctttacgcgcagtatctgataacttgcaaatccgcataacattaatttctcattcaccaaacaccagattatcacaatcactagtaactagatatcttgatcagaacataataaggggaaaagtcaaatggactcacctccatcccacggcgtgtcatccggtctgcaaaatcgtaccagacatgacaagcatacgacatcagaaccaaatcaacccacacaaaaaattaaaaaaaataactccacaacgaataggaaaatcacaagctctgcgagatcccctcggctccataacctagcgcctgagatga

SEQ ID NO: 77473 - DNA, 288 bp, Oryza sativa
gctcgacgcggcccagcgtgtaccgcgtggtctccgcgtgcccgcagctgcaatccctgcatctcagctcctgcaaggtccggaaattctggtgcccgctcaccttggacgcgccgatgtcgcggatcagggagctcgtcgtcgaccgcggctacatggcggtcgagatcaagtcgctccccatgctggagagcctcgccagcaatggagacgccgtgtttctgacgcaccccgacgccgcgccgtacctacagcgcgtgagcctcgagcacgccatttggctcctgc

SEQ ID NO: 77474 - DNA, 386 bp, Oryza sativa
agcttaatcaggcactaatcctgctgctattgcttctgttacctgaacattttacctgatcaattaaaatggctcaatactactcactcgtaccactacttcgccagacgtgcatgacaccacgagacacaagaacagatggaccgctaattctaacacggatctgacaccaactgatcatgaacaatttggcaattctatatctgcaaaggaaacctgatggtaccctttttacacgacgacctgatggtcaccggtaaatactccatcattcgggccaggccaatatgatatttatttattaattctggctctcatctctaggatgaactacatcgcgacagcaatatattgcgagagctcctgctaaaagactttactccact

SEQ ID NO: 77475 - DNA, 341 bp, Oryza sativa
aaagacagtgttttataaactcggcaaacttcttttgatctaattcagctttgatcttctgaaagttactgttgaagtcatgtagaaaaatttccacctcaacctctaaaaccttgaaaatgaataaacttttgctgatttgaagtccaatgcgagttacaatcatgattttcaaaacatgccaccaactagatgatcgatcatcaaaataaacaaattggagctacttagtaactgataatatatactgttggttcttaaaataagcatagctggtgtatattataaacaacattgtgtgtgtgtgtgtgtgtgtgtgtgtagggagtatatacaaatat

SEQ ID NO: 77476 - DNA, 466 bp, Oryza sativa
  unsure (1)..(466): unsure at all n locations
ggatccttaagtcacctgcggcatgcaagctnttgccgcgcatgaatggcgccgctagctgatgcgcagcgcggcgttccgatcgatcagattcgtgtgtgctcccgtgtgcgttctgatctcagtggtgatgatcagtcagtactcgtaatcaatcctctgtgatgtctgtgtgtgactgtctctctctcttgatttcgatcaaactgctggccaaagtgcacacatggctgatgagatattgagatctctctcaatcgatcgagctctcgctggtgagcctgagatagatctaggttggaaatgtcgctagctgcatgcatgcggctcgagcagcgagagagcctttgatgatgagggagagatcagctactacagagatctaattgtgatcaatatgttggcatgcatgcttgcatccgtggatggccccagctgcatgctatgctgcgtgtaacacaaccca

SEQ ID NO: 77477 - DNA, 466 bp, Oryza sativa
  unsure (1)..(466): unsure at all n locations
actcagctgtttaaaaatgttgggtactgatgtatccattgtttataaaaacaaaactcacatcttatgtaataatttgagttgtatttgaaaaaatgagataagtttgcattatctttgaggacttgggaggaaaaaatatagtattttgtgcagaatggcacggatgattatgagttaaagggaggtgactggatgaataatcaatgattacattagatggatgagtagtttcttgatccaatgattgataactctatactaatgcgatccgatggcttaaaattattgatgatgtagcttcttgcatgctttactttataggagtaaatgtctcttagtgggtatcaactatataggaagataggattttgtaaataatataagtatttctaaaatactaattgttctatcaaacgcctcttatntatttnttcccattntactcctaaccaccttctgactg

SEQ ID NO: 77478 - DNA, 446 bp, Oryza sativa
  unsure (1)..(446): unsure at all n locations
agcctgtacagtttgngaaggcgttntttgagatataagacaaatctacttcaaccgatatgcccttatgcacggccatacataacatagaaatcacacgtggaaggggtgggcaattagctagagcagcacgtgctgtatcgaaactgattgcaaaagaaggtaaatcggccactttaagattaccatctggggaggtccgtttggtattccaaaactgcttatcaacagtcggacaagtgggtaatgttggggtgaaccaaaaaagtttgggtagagccgggtctaagtgttggctatgtaaacgccccgtagtaagaggggtagttatgaaccctgtggaccacccccatggcggcggtgaagggaaagcccccattggtagaaaaaaacccacaaccccttgtggttatcctgcgcttggaagacaaactatgaaaaagaaa

SEQ ID NO: 77479 - DNA, 443 bp, Oryza sativa
  unsure (1)..(443): unsure at all n locations
ctagatgtatatgacgatctctatacagatggatcttatatgaatcgtatgatgaagtaccacatgagtggatatataggaaaggaatccaaatctgccgaatcgctcatgttatgatcttctacatcctaggtctccgcgttccgtcatctggcttatgttcttcatgtagcattcagatcgaatgactctatgaaattacgtcgatacttctacatattatgggtaacgtaggagacatccctattttcccccggnggtcttaattaccactgcttagctntcaattcgcctctgaccatcaaattaaatgtgaataacccgtcctcctctctttgaaacaaggggcgcttccggttctgtgcgtgcttcanacaattntgtcttctccatattaccatatctctagagtcaataattctctatgaggaactactgaactc

SEQ ID NO: 77480 - DNA, 440 bp, Oryza sativa
agcttgttatagcggcttgcgttctcgggattattgcttacatcttcatgacactctaatcctgtttatataaatcgccgagttatcatatatgctatgtaatctaggtcgatcttgctacctaacctcagcggctagcctctatcatcgaaaacagtcgacatggttagatactgacttcgaattagattacatagtgcatctaccatcttcaaaaggttgccatcgacttgtttaaattttatgcttctttctatgtttaatgttgtatcagttaagtttgatccattaaagcattacctggaatcgtaatatctagcttgtttcatgactgctactagagatactattggggtttcagccgatcttgcctgatttagttgtctcgctacttatatgcttactcgacatactgaatctaccctctatattaagatctc

SEQ ID NO: 77481 - DNA, 290 bp, Oryza sativa
  unsure (1)..(290): unsure at all n locations
acgttcttgaaggaagcagccaaatttgttgagctcacaaaggcacatgctgcgagggagaatttgaggagcattttttgcccatgtaaagtttgtaagaacgagatcttgctgcaagatccgaatgaagtattgtcgcacattgtagaacgaggatttaagaagggatacgagatatggacttttcatggggaagccggtggtcgtaacgaagagttagatgatttatgttttgatgatgcagaanattntataatcgaagacatgtcttaaggaaacatcccggaata

SEQ ID NO: 77482 - DNA, 332 bp, Oryza sativa
agcttaagctatgattcatatatgttatcttaaatatgaaataatgtggaaaatgtcagttggtaactatgtcagcctttatggcaaacatattgttggtgaatgtatgaaatggcatgttgctttcaaacaacaaaagtgctgcataagaaataaaaaatatatataaagtacatggctgaaaatggatagcgttgaaagaattgaaggtagggggaaattatacaatgttaaaaccgcacttcgtgccatgtcattggtacattggggaggatattgttaccataaattaccttgtgtgctaacctgcaggggtggagggctcgggtgta

SEQ ID NO: 77483 - DNA, 378 bp, Oryza sativa
  unsure (1)..(378): unsure at all n locations
gatgtataagaagaatattgatgcagtcataaaagcaatgatcaaagtttctatggaaacatgaaaaatcaatactcgatatctttggtcaactaaaagcaaaacaaaagaagtatagctgaaaatttgaaagtatattcactagaatacttcaaaactgtaagacatattggaggtcctaagtgtaactatgtaacaggaaaagacttcaattgtcaggtaatcagttctctcaataattgacagaagctcacctaggacatgggattctgcaagggtaaggcaagcaaatttccctcctgatntcaaaactctctttgcctgtagacaagcaagaggcgcttactaagtcagacataacatanagaacanaacatt

SEQ ID NO: 77484 - DNA, 435 bp, Oryza sativa
  unsure (1)..(435): unsure at all n locations
actcagctgtaagaactattggtagaggtttgacactgatctttgtggagttacatcttgcattaatatattttgtgatagtcaaagtgcaatatgccttacaaaggatcagatgttccatgagagaacaaagcacattgatgtgagatatcactttattcgaggtgtgattgctgaaggtgatgtcaaagtatgcaagataagtacttatgataacccagctgatatgatgacaaagccacttcctgctactaagtttgagctttgctcaagcttggtgggtgttacagtatagtcctagagactatttggcgcgcggtgattntacctacatgaggtatttttggtgattgatgtttttatgctacaagaggaaattcgtctcaaggtagagaatggtaaatatgtgatccgaatttggggccacaatatatt

SEQ ID NO: 77485 - DNA, 420 bp, Oryza sativa
  unsure (1)..(420): unsure at all n locations
ctccgtggtcgtctgacctcgccgtattcactgtctgaatcggagcactgatgagaagacctgcagtcatcttcccgaagccaaaatacaccggagctacatcgtcgccgtcaaccatgcggagattatggatatcccatatctacacggcgatggtatttggactgggtacaagatacctaatgtagatagaatatcttatctgtatctcgggtacgattcttaacttgtgtataaaagaaacaccctgagacttactctgttacgactatatttcatctgtatttgcatattgcgttagggatatagagtatattttgtgacgcggacttcctcacatatataatgggggtccgggtgcctctangggcacacgttgatcttccctagatcatacaatcaataatacactccgcggat

SEQ ID NO: 77486 - DNA, 375 bp, Oryza sativa
agcttgtcaagctccccaatgcctgaggaatgctgccggataatctattggcgcacatggacagcatattcagtttccttgccttaccaatctctggcgggatatttccagtgaacatgttgctgtccacacccaagaattcgagctcgggatatcacccgtgagattgttggatgagattctgaacactctcattgcctgcagccgggcgaatgccagcggcaagttaccggagagcttgttatatgcaaggttcacgacagagagattcataagatcggccaactgcaatggcagagttgaaacaagctcggcggccattacttggagctccttcagcatctggagctggccaagaaccggcgggatctgacc

SEQ ID NO: 77487 - DNA, 450 bp, Oryza sativa
tctctagaaatgagtacatatcacgtgaaaactgtccttctgttgaaaatttggaaatttcaatctccaccattctcttggatcccaacggccaggatagttcgaggtcaccctatcacacctatttgatgcacatttgcataaagccgcccgcacacagcctggattttttgtaaaaataccccttaactatctcattgtatactgcaatgcccttaacaaaagtagagtatctaaaccaaaggaaaacaaaagcagctaagttcagaaatatttcaaaagttttagttcaagtactgtacaataactccataagtacttgacaatagctccgtaagtactgtgcaatagatctatagatatgagagaaaaatgcatgatgactgaagcatgttaaacaactgtacaataactccataagtaccaacgacttacaatagtgtatatgaa

SEQ ID NO: 77488 - DNA, 429 bp, Oryza sativa
  unsure (1)..(429): unsure at all n locations
agcttggtgaanaaaaatctaccatatcatttattcataatagatggaagaggattgaacatatacgactattgatctagatgaaggtcacagactggcagctatgtaatcagcatggtccagaactataaactgccagtagggcatttattaactggttgttgctgtcatgatgacatgtggtgtaaaggccaatgcaccttgaaatagccaggcaatagatggaacatgattcagcgattttgaaccgtatagcgccaacaagagaataacaaaaactcaaattttaacaaaataaatcgaagtggctaatggatttctatcaagtatcaacccaatcccatcctagtttcctagctgcaagttgcttgcagctatgttcctcagccaaagtcaagattgctagaagctaaaattgaagtaagatca

SEQ ID NO: 77489 - DNA, 424 bp, Oryza sativa
agcttcaaatagtctgcaaggcgaggatatcagtgtcatctttcctgtgacgcgtgcgaactgtgaaattgatggtacagtcactgcgagaaacaaggacggaacctgcttgacttgatcatagctggccaactcggcagcattgatgatggcattgcgcgcaacattgggtccaatgccagtccacaaagcagcaaacccttcctgaggataatataataaagatgtgaagcaagcaatgatgtgttggtatggaacaggcaagcgcatgcgaagaaagaagcagaaggtcaacctgcctaacaatcttggcataggcatccatggccccagcatatcggcgcggggcgccgggcgccaccttgccctccgcctgaagcctaaccttgacaaggtcagtgggggtggcgatactgatcgcaat

SEQ ID NO: 77490 - DNA, 444 bp, Oryza sativa
agcttagggaagactgattcctcttaaccttcatgctcctgatggccactagtgtgccattgcctagtctccccctgtacatctgacaaacaaacaaagatctgatctcagctcccaagcttttcaaaatgcaggacttattcatcacactcatataagcccgtgaggttaatttgaacagaatacagcgaatttcatgcatcaattagttgtaggttgctcaatgggtaattttaccatccttaaaaatgtactgagagataccacattttgtattggaaatttgataacttcaggtgctaggtatcttgagtatctaaactttaacttgcttagggaccataaaatttctcttgctcaatagagtctgaactgatcaatggagaagattggcatacctcgccgaaagaatcttgccccagtagcaaagagttctcaaagttg

SEQ ID NO: 77491 - DNA, 427 bp, Oryza sativa
  unsure (1)..(427): unsure at all n locations
gggattagggggggcgcanaaagtgtagttatactattttggttgtgtgccggggtgggggttatgattctacgtgcgcggccactacccgtggaaatcgtggaagggaattttntgcggcgaataggtgggggaattagagcgaatttacctatgccgtgacagataacgataaaaagacacacgatttttcagtggaactgtggaagggagtttttctctctttnttttttttttttgaaaaccggaagggagtttttctgaccctacagagaccaaacagatcgctcgtgctcggtgctcccttcgcgttgacacggaaggaaacgacgcgacggctcgtttgtaccgagaaagctaatgaaagcccacggttgctgtttctttttttggcccacggttgcttctattttgggttaagcccatc

SEQ ID NO: 77492 - DNA, 417 bp, Oryza sativa
  unsure (1)..(417): unsure at all n locations
agcttcatgccaaagctattgctgtgcaatgcacataatggctggccattcttccagaggttgcttgtcgatttgttcaaattcatggaaccatatttaagaaatgctgaactgggacaacccgtaagtattattcctgcatattcatttgtggctgtctggtacatggttcactgcattctgattttggtacactatcatgttcttcttttctattgnagatacacctgttgtacaaaggaactttgagagtgttacttgtgctactgcatgacttccctgagttcctttgcgattaccacttcagnttctgtgatgtcattccccccagctgcattcaaatgcccaatgttattcttagtgcttttccacgcaatatgagacttcagatccctttatcaaatttaaagatttact

SEQ ID NO: 77493 - DNA, 125 bp, Oryza sativa
  unsure (1)..(125): unsure at all n locations
ntnggagcaccgggaaactatttatccatcatcccgtgaacccatcatggtcgtattctaaggccaatctagctagctacactctacacagggatatactctcttcttccctaaatgtttgacac

SEQ ID NO: 77494 - DNA, 444 bp, Oryza sativa
  unsure (1)..(444): unsure at all n locations
agcttgagtttgagatgaaggctgtggagagggtgcttgctgctgccgaaggaagaagtattgacaacaagctactagcccaatcactgggaagtctaagagatctgctttatgatgcggaagacgttatggacgagctcgactaccaccggctcaaacattggatcgaaaaaggttcatgacttacactgtcttgctctatgctttctgcttctttcttctttcatatatgtacttgagagcagctaaatgacataggtatcacatctgtattccgttggtaagttttgatataatttcacatggtttaaccattgttaattattgtcagttacaactttgtacaggggaacatctncttttgctcaggcggttttcctttctggttcccgcaacaaattgagtttgcttttgcaggtgaaggctccagtgctgctgctgata

SEQ ID NO: 77495 - DNA, 410 bp, Oryza sativa
  unsure (1)..(410): unsure at all n locations
tcttcactctttataatgctatcccaatgatcgatggtaagattcgttcctaatagtgaacccacagtttttgctgccagtgggttgccttttagctcgctagcaatttgcttcccaagaacctgtaagcctggactactatcatgtttatcattaccaaaagcatgcactttaaatagtgaccatatatcgtcatctttcagagcttctaacttaattgattgtactgttccaagacttttggcaatactctgtatacgagttgtcaaaattatcatattacctgttgcctcttcctgtgacgaattcacctgatcattatgtcttaaaggagccagtagttntttccagtcatctgtacggatttcccacacatcatctaagacaatgaggaacttcttagatttcat

SEQ ID NO: 77496 - DNA, 444 bp, Oryza sativa
cagtatgcacgaaacacggagcggtccattattgcgtgattaattaagtattagctaattattttttcaaaaatagattaatttgatttttttaaacaactttcatataaaaactttttacaaaaaaacgcatcgtttagtagtttgaaaagcatgcgcgcggaaaacgagggagaggggatgggaaaaggggtgccgaacacacccaaagtctcccttggtgggtaaaactgttgtatttatgtaagcaaaacttacaaaaaaaattacatcatcattcgtacattcatccctatctacactacaaaccggcgaatagggttcgtcgtcactactacatgtgtacataacccttatgccaagaggtgactcgacctcttaaagtttcgccaaaagttggtgctatcctcgcgacgcgcgaccgtgtagcgatcatagtcctct

SEQ ID NO: 77497 - DNA, 435 bp, Oryza sativa
  unsure (1)..(435): unsure at all n locations
agcttgctcttggaccagtgggcataccttatcattgctttggaggaaaccattcaggaagaactgcacattntttgaaatcacgctggctgcagcagatttatctaggtgcatctgaagcatttaagattgaagaactgacgatccagctaagaacatgagaactgccacattgtaacatgcaacccgagtgcataaaatgccagaacccagcgaggaaatagagagaaaatcaggataggagcagaatcagtaattcaagaggttttggattgacaacaagctaaatattttttgattattagaaaggaaggacgagatccagagagtggaagggttaaattgttcgataggatggatggcgcgactgaagaagtgaaccacatgagggcctggtcatggaacagctcaccgggccatacctttgattgttga

SEQ ID NO: 77498 - DNA, 427 bp, Oryza sativa
  unsure (1)..(427): unsure at all n locations
gcttgcactntgcattcagtacaatgagaatttcataaagccacaaattaatcaaaggaatgatccattccaagtgcaaaatgcatcagaaagcagcttaagaaatagtattagacaaagtgttaaggatataagaactgaatgacattgaaatctatccagtgagacattgaaatctatccagtgagagagatgatgaactgaccaatctggcacacctgcagagatgcaacactgcatctgcatatgctctcatgtacaacaacctgaatctagtcaggaatcaaacaactgaatgctagtatcagtaaggctgacaaccatgagcagagatggtcaagaactactacanttgccgtttctctcatcatcatagcagcttcttctacatagtaaaaggttgtgcttctccctaatgatacactcg

SEQ ID NO: 77499 - DNA, 448 bp, Oryza sativa
  unsure (1)..(448): unsure at all n locations
acctgcggctgcagctagtcaatctaagaatttaacttttattattcataacggcttatgatataaaactgagggagtaatatanttcgcaaacccctcattgagtatgatctgataatggattattacatgtggcgattaacaagtcacttgataagaagtgtaaattgtctttaaatgaggaaagcacagggcatgttctttttacttgtcctttggctcattttgcttggaatgtaattgccatggtgttgaatttacatactgtctctctatctttctgggatggtatgagagctatcaaaacaaaaatgaaatctcaagtgggtatggtactgtttgctgggatgttgtggggtttatggattacaaggaatgagtgggtgtttgaaaacaaactaatcaaaactcctttgcaagttgtctgtacatgtctctgtccctgatg

SEQ ID NO: 77500 - DNA, 450 bp, Oryza sativa
  unsure (1)..(450): unsure at all n locations
aagctggatacaattgatgttcccgcaactttcccaacaccagacggagatgctgctgatggtcttcctctgattgtgagtacatcaggatgtcgtcaataaagaccaccacaaacttatccaagttttccatgaacactttgtccattaagttcatgaagaaggcaggagcattggtcagaccgaacgacatcaccgtgaattcatacagtccataacgcgaggtgaatgcggtcttcggaatatcttcttcacggatacgcaattggtgatatccggaacgaagatcaattntagaaaagacagtggcacctttaagctgatcgaagagatcatcgatccggngaagaagggtacttgttttgatagtaacttcattgagagctctgtagtcaacgcacatccgctttgtcttgtctttcttctccancaaaatcacgggagcactct

SEQ ID NO: 77501 - DNA, 467 bp, Oryza sativa
  unsure (1)..(467): unsure at all n locations
ctaagcttcttatagctgggttgctatagtgaatttaaagatgttgtcaactntaggttgcacgcatcatattctacaaagcagtcggtatatcacttggatcatattattcgggatttcacaccgcatatactatatattggtatcaagtcacttggttgactataattatcaaaaaccactcagttggttggattatttattccctgactatatgcttagtttattcaattaaccccatagtcgggagctacacctattaggtgcatctagtcgatgcacctaagtttacattcagttatttttcagccctccacagtcttcagatttggtaaaagtacttatgagaccatggcaaagatgattgaagcactcggctntggagtaatctggttcgagagaagaatatcttttcgactgtgaaggtctcangggctactgtggagaatatgggtaccccataccca

SEQ ID NO: 77502 - DNA, 467 bp, Oryza sativa
  unsure (1)..(467): unsure at all n locations
tcgtcccggatccttnagtcacctgcggcatgcaagcttcgttcccagcaggcacagataaacaatgtgtagcaaggtttcctatcatcaggtttgtctatattggtntgcttatggtcaaggaacctacagtagatcacttcgggatatcatgcttatatccttcctaattaatcatgttaagaaaaatcggtctgccattctattttggcacatctatgatctatctgatgttcaaattaagctgtgaaatgaggggatgctgtttcctgtttctaccatctacatgcaattctgaagatcaataatcgttgatagtgaaataacctacgtcaaagtgtacatgggtcatcttcctccaataactctttggttaattctgtaatatgaggagtcgtttatagttgaaacatgagggaactccttatacattatgccatttactatcaatgagaggcatatgcctg

SEQ ID NO: 77503 - DNA, 458 bp, Oryza sativa
  unsure (1)..(458): unsure at all n locations
tgccgtcgactccgtggtcgccggacctcgccgtatccactgtctgcatcgcagcagtgaggagaagcccggcagccatctccccgaagccaaaatccaccggagctccatcgtcgccgtcaaccctgtggagattatggatatcccatatctacacggcgatggtatttggactgggtacaggatacctaatgtagatagaatatcttatctgtatctcgggtttgtttcttaacttgtgtatcaaggaaacaccctgagacttagtcggttacgactatatttcatctgtatttgcatattccgttagggatatagattatcttttgtaacacggactcctccccatatataaggggggtccgggtgcctctaggggcagatgttgattntccctaaatcatacaatcaataatacactcggcggattcatccccggacaggagtagggtattact

SEQ ID NO: 77504 - DNA, 415 bp, Oryza sativa
  unsure (1)..(415): unsure at all n locations
agcttatagcacaacaacgttgcatcaaatttacagaaganacagaaaacagcttggtacatctatgacctttggaggtcaatttcttattgttgttcgaggcgaatgtgtatattacatggggagaacaaaggagcgcaactgcgaggacgagtatgcatgcaagtcgtcttctgaacccaaccgtcaaagtccacagccacttggggactaaagacaaactagggttgcttgagtttgatggggatggaaacggaaagcaaatgggccagtcaatcttcaaacccaagttcctgtgatcatctgattcatccagggtgatgtgtaacctaaagaaatgccatgttgtgagttcaacgacaattggttttatcatttatgcgctacatcatgtaactagttcagttatcattta

SEQ ID NO: 77505 - DNA, 390 bp, Oryza sativa
  unsure (1)..(390): unsure at all n locations
cttgtgaagcgataccgtgatgggctactctttgtttctttcttttaacgtcgngatctggtgggcttattgtgagcaacacaagatcgcgtcctgtcagcccatggttttactgatttagacatgtattttggtgcggatactcttaacgaaaaaaggaccagagcgctaatgttattgttcatcggcctcttgttgcagacgggcttaataagagtcaaagtaggtaggagtagagcttaatctccgttccaattttgtgcacgtacaaaaaaaagatctccggaagagaaacacaacatggaaacataaattttgatgttaccctgtgcaaccctgcaacgcggcgctcgacccaaggcccccggtcgacgcatccgcgccccgtgc

SEQ ID NO: 77506 - DNA, 435 bp, Oryza sativa
  unsure (1)..(435): unsure at all n locations
agcttattcaatgggntgctnnggggagttgtttaatgtatctatattttttacaacacaagtatggtttccctgcattttgaaagctattgtgttactagagccacatttgtattttacaccaacatcaatatatcggacaacgaatatattatatgtcgcttgaaagcatttgcaccttagataacttatataagtgctttctgaatcaaattgttgcagatggttaggatgttggacatccttgctgagtatctatccctccgaggattccagtttcagaggcttgatggcagtacgagagcagatcttcgtcaccaggccatggagcattttaatgctcctggaagtgatgacttctgttttcttctgtctacacgtgctggtgggcttggtattaatcttgcaacagcagataccgtgatcattttgatt

SEQ ID NO: 77507 - DNA, 447 bp, Oryza sativa
  unsure (1)..(447): unsure at all n locations
ntacagaataccttcgctttggattgatctgctcccaccagatattgaaaaaaaaatgtcttggtaagtgccagggaatgcaccaactctacttcaaatgtcaacagtaggtaaaggtaacaaaagtgctccaattcttgcaagctacaacaaacttttattctaaagcttatgtaattctcccacagcaccaacaatatttctagttgtcattggctcattgcaccaatactaagagaagacaaacctgatgaagatcataaattaactgtgctagatcctcgattgaatagatgtcatggtggggtggtggggatatgagaggaactccaggtttggagtttctcagccgagcaatgtatgcactgactnntttccctggaagttggccccttcccaggctttgcccttgtgaatcttatctcaattgtcacattactaaaatgt

SEQ ID NO: 77508 - DNA, 431 bp, Oryza sativa
  unsure (1)..(431): unsure at all n locations
agctntggcatgangtnnattantatgtgcacatatttattttaggtattgttgtgattaaatctgtaggttcctaccttctctgcagttcttgcaccccccattccacaacggcgattaaattagttggatatttcacaaccttgtgaaagtgatattctacaacatcgctgagctccttgtttagtaacaaaatgtacaggcaaatctcaacattcctactggtagtgatacatgttactcaagtggcttttgccttttgtggcctgtgtgtatcttagttatgcagatggtagaagtcattttaagatggctgtatcacctttctttttgctgaagatcttcggaatgatcatatctgtacataattttgcttctttcacaataaatgatcgaccttctttgatgctcgtgcaagcaaagcattcata

SEQ ID NO: 77509 - DNA, 413 bp, Oryza sativa
  unsure (1)..(413): unsure at all n locations
agctttggttattntttaggaccaagccacccacattcgccacagctgaagaacctatggatgctgaagattggttaaggatcattgagaagaagctaactcttgttcgagtacgtgaggccgataaggtgatctttgcggcaaaccaattggaatgaccagccggagattggtgggacacgtacaaagaagcccgagaagaagatgctggagaaccaaactgggaggaatttaccacagccttccgtgacaactttgtgcctgccgcggtgatgcggatgataaataacgagttcaggaaactacggcaagggaataccacagtacaagagtacctgaaccgtttcactcagctggcgcgctacgcaactagagatcttgccgacgaagaagaaaagatcgacatattcatt

SEQ ID NO: 77510 - DNA, 239 bp, Oryza sativa
ctcctcttactctcttcttctctcgatccatcctctgccttctcttaccggtgctgggggagttggagctcaaccttgccgatgcatgcatcatgatgcactctgggaggtggagggctgctagagctcgagctcgccggtccatgcaatggatgtggacggcagccagatgtcgagctcgccggcaacatgggctccagcgtcgcctgctcactcactatcttcacctttgcctcatg

SEQ ID NO: 77511 - DNA, 411 bp, Oryza sativa
  unsure (1)..(411): unsure at all n locations
gctagacaccggatcttggtagcgctctcggcactgcttcagtatgatcttgatgattctactgtcactcagctgtacctcgtgttcgaatacgtgcaaaacgggaacctacggagcaggatntcgcgtatgttaaattgtcagctgttctccttcattggttttcttttcaattgtttgcagtattcaatcactgactgtttgcttgcacttgattctgtactgattttcaccaaaaggaactgaatgaatgaagcttacatgggcacaaagaatatcagctgccatcggcatcgccaacggcattcagttcttgcatgctgggatgatgcctggcctcgttggaaacaatctgaagatcaacaacattcttctcgatcagaatcatgtcgcgaagatcagcagctacaa

SEQ ID NO: 77512 - DNA, 455 bp, Oryza sativa
  unsure (1)..(455): unsure at all n locations
agcttggatgtgtgtgtgagtgtgaatgaagtgaggtctatttataggatatgtatgacgggtataggaaggagaattgtccgaagtgccccttaaccgccatcatgaatgcatctggagcgtccatgccaaaaacttgggatcaacggtgatcactatggttcggccgaaccagtgacctgtgctgggcccccctggcctggcctttggcctggctcctctcctggtcctcctctctccattctttagtgttttgggctgattttctagtatttctatgaagtccacaacccatccttgtatggatacatatttctcctcactttggtttaaatntcctcccaacatcgggttttatcacctgcatataaatatacaccaacactatggaatatgtgagaattaagcacctatcactatggttgatattttattatccgaactntatgcatatg

SEQ ID NO: 77513 - DNA, 380 bp, Oryza sativa
  unsure (1)..(380): unsure at all n locations
caagctgcgtgcgtgggcacgtgttggtctgtctggcccgtgctatcttggccgcgtaggaaaaatatatgagggagtggactgggccggcttactgatgggctgaaaaataaaaggatatgagagagaacgctatcccggcctgagagagaagggaaagatgacgatgaatagtgctactgtattaataactagtgatgcacgtcgacatatattgaccatatacatccactgnctaaatcaatcatgagggttagtatgtggtaacataaatcataaaaaaactatgttctggtaatggtatcttattggaataaatcattcctgaagatgtcgatagtaatgtccatatcaatcctcattggttatctattcacatg

SEQ ID NO: 77514 - DNA, 390 bp, Oryza sativa
  unsure (1)..(390): unsure at all n locations
agctngaagattaaatttaagataaaaaaaattacctgaattggattctaagacctgttcagattgctaccgaaatgaaccttttcaaaatttgacaataccaaaatttggacaagttaacaatattaccagattttaatattaccaaattttgataggatagattaaatggtttggtacccaaaattctttaggcagtaccaatatttgataacaaactaaatttattaacatatntattaattttactaaaaataatatggttcaaaatgccatcaatctgaatagttgttcaaaatggcatcaattcctacacgcacgatatgcccaccatagagtacgcatttcatcaattcctacacgcacgatatgcccaccatagagtacgta

SEQ ID NO: 77515 - DNA, 249 bp, Oryza sativa
  unsure (1)..(249): unsure at all n locations
caatcttctgatacccggatcgacaanatccgataccgtttcttactctacaatcgataacctgacgaaagacccatatgaaatcctatgtagactaattagtatgccatttaatagatctcaatttacagaattatagcaagtggaactgtgtcaatcagacgagcggttggggagatatggatatcctaagattatttggattttctatcggaatgaaaatgatttatctaatccgctggaaaataa

SEQ ID NO: 77516 - DNA, 350 bp, Oryza sativa
  unsure (1)..(350): unsure at all n locations
ggctattgagccgcgcgacataatggtggtatgacgtccacgaaataaagacactggacctcctacctgaagcttaacactggaggatacctancgatatctgttgacttcatgtaagagaaataaatcatatcctagtaataaatccgaacatgtaaatgtctaatagcttcataactgagatatgataagcacatacttcgaaagatccatggcggtgcgacgcctgctagcatcccgggttcggcgagctgtacgcctgcgacgcctgcagattcacctacctacatctgacccacgccgaggagacgatacccaccgctcaccggacagggctgacgttacgctca

SEQ ID NO: 77517 - DNA, 363 bp, Oryza sativa
tttattatttagaagggcaagtatgaagtttcattttgtgaacctgttccaccatgtgcaccaaacttttgcacctacaatttacttgtgttcaattgaaaacacaacccatttatttgattgctagatcttccacgttctcattaaatgttggctgtcactgatgatctgatgcaacatttcataacacaattggtcaaagaatccatgaggacaaacttactgcacggggggaggaacaaaaccactgtcttctaacaactagctgactggtgatgtatgcacaatgctgctcgattatatgtaatcgacgggagtgcatatatctttctatagacagaacttctttatatatctgtggct

SEQ ID NO: 77518 - DNA, 458 bp, Oryza sativa
  unsure (1)..(458): unsure at all n locations
agcttctcctcactctctaccttattctaatgtacaaaagatacaatagagccttgtgtaattcatctcaaagttgtgtgtgggaaatgagagagagaagctctattcatagcctccatatgatggttacaggtatgggaaatgaccaaactggcctctaaccgtcattgggatgaaattaggaccatccatgtgaaatatggtgatcaacggcctccagatgggttcgactgaacccgggacgactccgttcggctcgtttttcctcgtggacactaattntgaggcccttatcccattggcatggtggattgggccatttgggggtgtttaattgggtttttgggtccaaaactccataagctcggacacgagtttgattcttccncctctttcatgtatatttnctctcaactnntgatcgttggcacctgcatatgaatatanaccaacactca

SEQ ID NO: 77519 - DNA, 317 bp, Oryza sativa
  unsure (1)..(317): unsure at all n locations
agttatgttgcacanaggtggntccaaatgttgagtggtggtgacaggggcaaagttttgctagtgtactcaaggtgttgggacttggcatgatatgatacttgggatggactggttggaacgattcagtccaatgtggattgattggaagaagaaaaggatgagattccaacatcatggaaacaatggtactttgacaggggtgatggatcagacagatcattgtagacttatctcatggagacagttggcatggatggcaaagaggggggccatatctcatatgattcagctctgtataatcacggaggagattg

SEQ ID NO: 77520 - DNA, 452 bp, Oryza sativa
  unsure (1)..(452): unsure at all n locations
ttcttgttgtaacgagtgacacgcttgatcgagttagccaggaacagtttgtttccttttaattccccagtgcttgctgacagttgtatacatttaatagtctcatatcactagctagtatatatacaaaatgaataaaagatgtataccgccaaatcaaatcacttgtggttcctgtagatgcttcatcactgcaccgtctaattaaaccgatgttaattgctgctagttctcgatcaataaaggtcggcagcgagatacacattactgctagtttttattctgaaccagcaaaagatacatcaaggaccatattaaattggttgaccggttgaaccgtcaactcattaatggcttaatttccncactcctctcacccatagtaccctgttcccnctcagtcaccgccactgccactgcaagctcacnctcttttgcacagtacactacta

SEQ ID NO: 77521 - DNA, 374 bp, Oryza sativa
  unsure (1)..(374): unsure at all n locations
tgggatctcacattattgtgatagcacggaaacatgcttcacgcctaccaccaacaacatctactattatttttcacacgcaattcttcctacctgccattgtnttcctctgcttccagctcatatcggcgctngaacttggcaatctgccctatgctctgagccatccgatgcttcgctctcatgtggtgcaacttgccggtgtggctgatactggtcatcatgatgttcatcaacctgccactctaagtcacatatgagatatactgcatctgaggatgtagtcccttcctcatctttccgacctaacaaatacaagtgtagtagattcattatggaagacaagaacaaccatgatcatatctcatagcagt

SEQ ID NO: 77522 - DNA, 401 bp, Oryza sativa
  unsure (1)..(401): unsure at all n locations
agcttatcatttccatttcaatattagccagagtagttggtatttatcattccactaacaaaaatagtatgcaacaagtgatgcgtctttccattctaaatattggtcaaatttcaattgggtattgaccattgacataccactagtttcggtaccattccgagcaaaagtgatcccttcattgaattccgcttactcgattccttcaaattacatttatctataaactcatttttctctatcatatttgttccgattatccaccattttacatataatatcatgtgataatttgataaaatattgtataataatactnattggaaatcaatcgaatgggaaaaaagagagaaaaagagttgcggctgatgaagcataccgcagttgccgcgtcacattct

SEQ ID NO: 77523 - DNA, 313 bp, Oryza sativa
ctttatttcatgaaacagctgaaaatgcagattatgttcatgccccacaagtttgttttaataaattcacgataggttcacgtaaccgacttcaatttgtagaatgattttttcaacgtataatgacgcgaataataaggagtagttactcaacctaagtagaaaacgcatggtactgacagtgccgaatctctatcttgacacattccttgttgatgcaaccacattactatttggacaaatttggatgactcttttaacattctatcttttccttcacatgaaagcgatagctttttctcgtgtgcatggc

SEQ ID NO: 77524 - DNA, 423 bp, Oryza sativa
tttcttgttgttctgcacatcataacggaagtggaagaagatggacgtcctagtgccccggccgaagccgccaagaactatgtacgtcacagcggttgggttgtgcgggataacgtgcctgtcagtactgtgtactggcgaagaacaatggcacgcggagatcatgagagctttgtcccagattcggagaaagagatgctgtggaccacaatgctcgagacattcacccttcctgcgggtacagaggacaaaatgataaggtggactctagaaaatatggcagaacatgttcagagcttcaagggagatctgtaccagaagtatatcctgaaggggcagacaccaaacttcgacatattccatgctatggatcctaggagagttcgttgatataagacaggtgaacaatgtgctgcgatgatg

SEQ ID NO: 77525 - DNA, 441 bp, Oryza sativa
  unsure (1)..(441): unsure at all n locations
tcttccataactntgaagtaaactgactacctcgatcagacactattntcttatgaacgccatgcatacacacaatccttgccatatacaattccgccaaccgacttccggaatatgttgtctntactgggatgaaatgagccactttggtaagtctgtcgactatcacccaaatagagtcgtggcctgatgacgttctgggtagaccagtgatgaaatccataccgatttcctcccacttccattctggtatcttcaaaggctgcaacaaacccggcggatttctgatgttctaccttgacccgctgacaaacatcacacacagctagatattccgctatctcacgcttcatactttgccacaaaaatctttccttgagatcttggtacatcttggtactaccagggtgaatggagtataaagtatcatgagcttctttc

SEQ ID NO: 77526 - DNA, 473 bp, Oryza sativa
  unsure (1)..(473): unsure at all n locations
agcttacttctaatctagatatgcgtacgtccagatttagagacccatcataagttggaacatattgagatggagggagtagttactggtgacctgctgtgttagcgggctagagctcacaacttataaaacattattagggaacgcagcccgacccaccatccgtggaccacccagataacattgtgtctgcttcaccacatatacaacggagccacaggctctaacaaacaccaagatatacactgagttggctggaatatgtcatcgcgtccgttgatttgctcatatataattaatcttcgcgtggcgttgatcagattagaaatattcagataactgatcaaaatgcagcacaactacgatatccgttcgcatgatacgcatcatcactcaacctactataatcttaattatatantacctccccaatttaatatcatcgctgcgactcgatcgttcatgtgattttg

SEQ ID NO: 77527 - DNA, 451 bp, Oryza sativa
  unsure (1)..(451): unsure at all n locations
cttcttaagtggttcattgattcttacttctgtgatcnaccctgtangccaatggagctctccatagcagtcaatacatctttaattgcattatcccgccgtggtattttctgcacagagccattcatgataccatttgctgggaaggttaataaaataaactctgttgtgcttatgtttaatccttcttgcataagcttttaaaagctctttattttttttatcatgttgacatatgctgttttgataaactgggacattgacatcggatgacatggtaaatgatgtacccatgtgttgtattttcaattcaagtggaatgttgtcaaccgatgtgacatgcatntcatgaattccaaggttgtgtatgttggaagatatgaataataataacagttgcaataaattccactccgacacaagaatattgtcacgtgcatgcatatattcg

SEQ ID NO: 77528 - DNA, 235 bp, Oryza sativa
tactaagctctgtcgcggctggacttacgaactgctgtagtatagactccccctacttctataaaggcttcttatgcacttcatccatgaaccatcggtacaaccttttgagctagcgagccaagacatactggagcttacgacttccctcacccgagaattgcattctgcgttcagccttcaccggccagccgcgatggatgattaatcgataggatacccaatccggataatc

SEQ ID NO: 77529 - DNA, 269 bp, Oryza sativa
  unsure (1)..(269): unsure at all n locations
gttgcgggcgtgatgaagaatggaaggaatgggatctaattataagagataatacatattcctgatctgataccgcggacgatccctatcctagctnggcaatcccttgaaaatgcaatgcatgttcccttgagatgaaatagctttttctcaaaaaaactatcaaatcaacttacgcatattcccttgcttctgttaccacncatatctactgtttctatacttgctagctagcaacctcttatcacacagaaagcgtgacatgaatg

SEQ ID NO: 77530 - DNA, 490 bp, Oryza sativa
  unsure (1)..(490): unsure at all n locations
nagcttacaatagatgtattaatagctactagagtcatacccgaacacttncgaaagcttccggactcctgatttctattctattcctattccactagctagataacacaaaactaacttgagagaatatgagagagctcttgcttgaggtgtgtgagtgaagtgagaaggtgaggggtctatatagcctaccaatgacagttgtgacagtgggaatggtcggaaataccctccaattgtcattgggagccaatctaaaccgtccagaagaagccctgcatctaatggcggcgagggaggttcggccgaaccaatggccggcccatccagcccattatttggctggtggcctcctggacttctccactccgtagacttgtgatatttggcccaattcatcgtgtcaattctgagttcttggaccattcatacataagtntgattcaagacatcatccgattgattcatcgtctgatttgatgtcgattct

SEQ ID NO: 77531 - DNA, 437 bp, Oryza sativa
  unsure (1)..(437): unsure at all n locations
gtgtgtgagtgaagtgagggagtgatgtctntatataggtgtatgtatgactgttggcgaatgggaaatgtccgaagtgcgctccaaccgccatcatggagtgatctatatcgttcacgccaaaccctagcctgaatgtctgagattttggttcggccgaacctgtgctgggcccatctggcctggtctttggcccatctcctcccctcattctcctttatccatttatcagtattttgggcttgattgctgacattttgatgaagttcacaacctattcttgtatggatacagaattctcctcactntagtctagatttcctcccaacatcagggtttatcacctgcatacaaatatacaccaacattgtggaatatgtaagaattaagcacctaccactatgttggatgttatattatctgaactctatgcagat

SEQ ID NO: 77532 - DNA, 488 bp, Oryza sativa
  unsure (1)..(488): unsure at all n locations
nagcttcggtctcgttgtattccatgcaagatgcaacttttgcctgtggccagacgacgagagagaagaaggttaacgaaagggacatacttcctccatcctaaaatgaagctatctttaaaattgatacgggtattaaaaaagtagatgaaaataattggagaaagtgtgtgattggttgaaaagagaaagtatatgaagaagaatggttgtgattggttgagaggaggaggtacgtgaagaaatagctntattttaaaacaagacattgtactaaaaatagctacattttagaagggagggagtacatacatatccccgagaacagcagcaaacggaggaggaggaggtcacggagaacaaaagcaaaggctgcactcgtaagatcaagttcccactactttttanatcatttaaattattttatagttaattatantaatagtacctataaagatatgatatcctattagtatatgatcccacat

SEQ ID NO: 77533 - DNA, 399 bp, Oryza sativa
  unsure (1)..(399): unsure at all n locations
gacatataaataggggtggtgactntagtcctctgtggtagcaccaaccggtgctaaagatcaccatgatctttatccccggttggtaataccaaccgggactaaagttacgatctttattcccggttggtaaatcccggtggggcctgacatgccctgacagcattcgaaccgggactaaagatgatctttatccgggactaaagatcatctttatccccggtttttattgtatccnggactattgtggaaatcggccaaccgacgaaagatggtttctccaccagtgacatagagcatctatagagtatctgtatatattaattcaacagcaaacatgagctcgatttctgtactgataaaccaaccacatacctcgatttctctctcaagtaatga

SEQ ID NO: 77534 - DNA, 389 bp, Oryza sativa
agcttgtcttgcttcttcaggagcatcaaagaccacaacgtctgcagacttcttcatggacctactcaactggaacacagggtgcctgcaaagcctctcgacacctttcctaaaactaaatttgtcgaacaggccttccacatttctgttgccaaattcttttccaaggctgctgacttggtatttcgaatcattaccaagaggagaagcttcgctatggcgcttctgttggcctatgtcatgcttctccggtccttcaaatttgttgttctcacgatgatcaaggaattgttatgtccaaacagcagctgatcacaagtagccatatcaaacatatgtttatctatgcctttctgatctgaacaaatgatgggtctctccaaattctc

SEQ ID NO: 77535 - DNA, 421 bp, Oryza sativa
  unsure (1)..(421): unsure at all n locations
ctaagcttcctgcactgtctgacacataannatttttccttcctgatgtgtngtgtcattggtcgggctatcttaaagaatccttcaataaaccttcgatagtatccggccaaacctatgaaactccgaatttctgtcaccgacttgggtgctttccattctgtaacggcctctacttttgcagggtccactgctactccaccggncgagattacgtgacctataatagcgacttccttcaaccaaaattcgcacttgctgaattntgcatataactngtgctttcngagtttctggagcaccaatcgtaagatgtccgcatgttcttcctcatctntggagtagattagaatgtcatcgatgaatactaccacaaacttatctaattaatccatgaatactttgttcataagattcatga

SEQ ID NO: 77536 - DNA, 472 bp, Oryza sativa
  unsure (1)..(472): unsure at all n locations
agcttaatatatagggatcctcatgttaaatataaatntataaatcgtactaacgatntgtttctatcgatcattntacccactaagcagctattgaaattgctactagatggcagatgctggctaccactgctttgctcctgattggataagatttgggttcagtgatatgccacagcccggatatggattcgactacacaggtgtggccgtgtggcaaatgttgacaaaattaatgaatcttactaaactctcatttatattgtatcatgtgcagaagaggagttccacaagtcactcgatgagcttcttagtactttaaatatcactgagccattcttcttagttgtccaggtacatgcccaanacattaggaaccctgcatttcataataattctcatatatattntctgaatcgtttctttcattttcattctatggatttcttgganggtcatatgggctaacatg

SEQ ID NO: 77537 - DNA, 255 bp, Oryza sativa
tttcgtttggtttaggagtcactcacctgttctgttgctctggtatattttcaactgtctcaaagtcccaattaagtatgtccatgttccaccctggagatgcatgacgcatgcattccattacacactgtgacaccatgatctttatcttgtcatgcctggtgaaacgtgattcccctagtggatcttctgtgtttagtgaatcaagcaccgataacttcttgctctccatgttaaatacgtacagcacgtaat

SEQ ID NO: 77538 - DNA, 381 bp, Oryza sativa
  unsure (1)..(381): unsure at all n locations
agcttgtcctatcatgttgctggcattgtctctaataaaccttgtggttggtgctcatgttactgatggagtatattgtagaagcagatttatgttcattatgaaatatatatcgcttgtttgggataattctaccgtttgtgctgctctcacaattttctcacaagctacttatgaagctacttttcagcgattggacattttttggtgcattcaaaacaagataaatcagtaaaacatgattaatctgaatcaagtattagttattataaaattaanaattgatttattngattattttaagaacttctctatatatagtnttttatgaatcatattgtttagctattctaacagctaatacataatgagaaaatagat

SEQ ID NO: 77539 - DNA, 428 bp, Oryza sativa
  unsure (1)..(428): unsure at all n locations
gcaacatcagcccaagagcccatcattgttgataccctaacaatcccttctccttaaaattcaacttgtcctcaagttgatgccaattaaacttttgaaaacgtaaaccacctgtgtcccatggcacctgtagcactcggatgatcaatgtgatcaagtcatccctatcaccattgcttttccttgtacgcacaatctttcgctgcagcttattctctttgncttctccatagtactcatggtgtcccacaaggnttgcaataatgatttgatggctcgagtaaaagtgttcttctatgctgaaatgaaattcttgatggcactnttctttattcctttcattttccatcggccaagaccattcttcagtataatagaccaataatatgtagctgaagcacataatagcactgaattctatatcccac

SEQ ID NO: 77540 - DNA, 446 bp, Oryza sativa
  unsure (1)..(446): unsure at all n locations
ttcttatctttatttacccgattacgactagcaaaacccaaccacgcacctcgagcccagcctaaaaccaatttggggatnttgaatagaaggagcggcgtgaagccaattccacaataaccaaaccattccatagtgtccaggtgatatgaatgttcccaaagtctataagttgaaaaccacctaatgttacctaattaaattgcgaagcatctacctaaaattaaactagtggtgccatgagtagagtgtccactagttggggttntgtttactctagggtgaacaaggaaataataacaatagcaataattataaggtcataacatatgtaaatatgcatggctaaataaaacagtgataacgcgggaattaaataaagcgataatgcttaattaaattaaaataatctgtaactggattcatatgctaagatgagtgactgc

SEQ ID NO: 77541 - DNA, 303 bp, Oryza sativa
  unsure (1)..(303): unsure at all n locations
ctcatctagcacatgtctttacatgctcctttcacctagcgacgctggaatgcgaatagttcgaccactcctggaacgctgcttcccttaagcttttctatgtctagaataggtggcacccaaatcgccaacttgtaaaaatgtacatactgttatgtaagcctttcggcacaaaaatgcaaaaaaaaaaagaggaaaatgaaaaanaaaactggatgtagggttattatccaccttggaggcccgaaccagtataaaatctttgtgtttttcgcctctttacctgtgtgaatgataattcgt

SEQ ID NO: 77542 - DNA, 443 bp, Oryza sativa
  unsure (1)..(443): unsure at all n locations
agcttgcccatagctcanatgcttcaagctgaacgaacgttatactttacaaatggattatgcagcccctgatatcatggatgatgacactgaagcattanggattgcaagcaatatgcccaagctcagagagcttcagctgattggcaacaagctaactaatgatgggctgatgtcaatccttgaccactgccagcaccttgaatccctggacatacgccagtgctacagcattcaaatggatgatgctctgaaatcaaagtgttctagaataagtgatcttaagcttcctcatgactcgatctctgatttcaagtaccgggcttacattntcagcagcagtgccttttctggttctgaattagagcttgatatgtatgatgatctgctggatgtggtcactgatgatgatgatgctgactntgatgatatggatgattatg

SEQ ID NO: 77543 - DNA, 206 bp, Oryza sativa
gggtaaacaggcacgtccgtgggtataatgcgtccacgggcaatgggcatgggcaaccatccttaccctttatgtagtaattggtatacccacaggcatagataatctcacgggtatgggtaagggtaggcactacccgtgcccgtcgcacccgattgccatccctacaagcgatgtaacgcatgaatcccccatcaccaaaaccc

SEQ ID NO: 77544 - DNA, 454 bp, Oryza sativa
  unsure (1)..(454): unsure at all n locations
tcttattttcttagctagtagntttttttacaggacttgactaactgcctggtaattgcttcaagataggttttctctcgtcgaaagatatatattcaaatactccctccatcccaaaataaatgcagttttccattgttcatattcaacatttgaccgttcaatttatttaanaaattttatagaattagtatttttatttttattagatgataaaatatgaatagtattctatgtgtgactaatgggttttattttttttataaatttttttaaataagacagatagttaaacgttagacacagttatccacgactacacttatttttaggacggagatatatcgagctntgtcatggagttgtgcaaagcgaacatgcctctgttatgtcattgatgattgggaatcatgtncagcaacgccagctgatctgaccacttgtcagcctcatc

SEQ ID NO: 77545 - DNA, 461 bp, Oryza sativa
  unsure (1)..(461): unsure at all n locations
tcttcgtcggagatcgaactcgatgcattccaactcgaatgttattactcgtcaaaataatgaaaatagaaaagggtggtgatgcgccaatgtatntttgaaccgtcgtaccttgtttacatgtgtcgggtcatatttatacccaaagtacaaacatgtccttgctggacacgactctatcaatattacaatttattatacgaacaaatcccttatgcggactcttagcatacatatccgtaaggaaactgaaaatatcctaattaatagatacaattgcctttttctggacttaatcctcgcgtggaatgcctatcaagtactttgataaccctgatgatagatgtgggatgtctttcaggctgctgatcgattatctcgtggattggaccactgatatatatactgagctatctgtatagcgaaccacttgtttttaacagatatcacatactcatctg

SEQ ID NO: 77546 - DNA, 361 bp, Oryza sativa
  unsure (1)..(361): unsure at all n locations
ttctntgatgggccctgcctggtcgtccaaattagcagtcaagcactagcagaatttccagcgtctatcccatatctctgtcttccactcatatcctttactttacttttgtgattgaaacacacatgcacaggacagagtgtgattaaagttgtcaccgaaatagatgcacagtaaagacataatatttacgtggaaacttttgcgggaaaaaatacgggcaccgatcagctatgatcactatagaggagttacttatgagaataacaatagaaacatcacctttntccatactatttacaaaagtatatatatagcagataatacgaaaacacctaatagaaaaagactnggactcagt

SEQ ID NO: 77547 - DNA, 350 bp, Oryza sativa
ctcttgctttatgatgtgccaccgaatcgtccttgtgcttaacatacgagaatagccttggttatttagaggagaacactctactctcccagtggtcatcccagataagtaaatcatatcccgatcctagaacgggcttatcaattcctctgaacaaaacatcatattaaaaaatgtctctccaccaaaatgaaccacaacttctcgtagtttgagggaacaacattgggtagtatgtggacgaaatcaagttcacccaagggatatctgctctgcagtagaaattgtggaggtgctttatcatgagagacctattctgaattcttaaatcaatgactcccagtccactc

SEQ ID NO: 77548 - DNA, 313 bp, Oryza sativa
cttcttggctgtcttgacgcaccatcggagataacggttgatggatggtgcaaggtgctggaaaacaacttcattactgtggttccataagcgccagcagcacatgaggaagaaggtgctgtttagtcgttctggaaagtctccagaccagtggatggtgtgaatctcactcaaggagggtaacatgtgtatcactcgaatcacgccccatgaagcataatccagggggcacgcaacgaagatgtgatcagtgtcttccgggcaggtattgcatagctgatatggtggggaggggatgatagacttcttgtgc

SEQ ID NO: 77549 - DNA, 362 bp, Oryza sativa
cttgttgatcctataacccaaagaagctattaatatctttcagtcctctcataactaagtagaaaaccaaacattgcaatgattaaccaagtaagcaaactgaattgataaaaaatcacactccattattatgataatagcccccgactgacaacggcaagaagaaaacttgatgttgacagtcaaaatagggaaatacaatgataaagttaagcgtagaaacgacgaatatgttcaatgttccaagagttgtcgacgagagtgccgtcttcgcgcttgagtcggtatgaacctggtcgggtaacttcagagataataaatggcccttcccatagaggagataacttgtgccgatctcgtgt

SEQ ID NO: 77550 - DNA, 414 bp, Oryza sativa
  unsure (1)..(414): unsure at all n locations
tcaagctngatttctcgaaagcgtntgattccgtcatttggtcaagccttttcaagattcttgctgtccgatgtttcccagaaaactggattagctggattaaggggttgctttcctcctccaagtctgcagtgcttcttaatggagtccctggaagatggatttgctgcaagaatggccttctacaatgcgaccccctatcttcatatttgtttatcttagttgctgatgtgttacaaagattgcttgatagatatactgaaatcagacatgcaatctaccaagacaggccatgtaccaccatccagtatgcggatgataccttgattatctatcgtgcggaggaggctgatgttcttgctctataggagactctgctacagntctccaatgcaacttgactgcaaatcaatt

SEQ ID NO: 77551 - DNA, 372 bp, Oryza sativa
  unsure (1)..(372): unsure at all n locations
gccatcatgatgatgcccataaccagctgctggagttctcacgcgagccggaagcttgtgagctgatgagggttgtcgccgcggaggtttgggatgcagctgttaatgatatcttcacggccagaagcctccgtcagatgatcaagagcctgttctggagcatcaagggtgccggtgcccgtgacaagaatagccccgttgctatcgtcccagctggagctcaaggaaacaagaagcagtgagatgtgggaaggattcgacttgctggagcgtggagcctgcattgcatcttcatggtggtgaaatccagttactgaaatgcatttatntagtctntaatntaatggttaagtaattaagcagtgagatgtg

SEQ ID NO: 77552 - DNA, 334 bp, Oryza sativa
  unsure (1)..(334): unsure at all n locations
agcttcatctccttgcttgctgacacatccgtgctgatgccagcgactgtggcatatctaccaacgcttacctctcaaaatatatgacgaagaatacaatctttcatacatggagtgaggaaatatattggttcgggacctcangatcttacacaacgctgagtgcgcaagtaatttatgtggcatgatccgtctatagctagggtgaataacgtgcgacgccanactacacgcatcataaatgatatggatgagtcagaagcacgcggaatgactctacactgcatcaagcgtgatctgcgcggccatacttactagaaatgcccgatgaatg

SEQ ID NO: 77553 - DNA, 429 bp, Oryza sativa
  unsure (1)..(429): unsure at all n locations
agcttcagtctttctactccatgtccggtcgataggtgtctttggccaatgggatatgataggtgggataggaaaatggaaatggataaatggctaggattaaatgacgtgtgacgaatggatggctangatgtaatattgtcttttggagggtgggatattatttcccaatcctattttgccaacatagccgaaaggcgatcgaatgaatcaaacgatcgatatgatccaattgtgacttggataacaagcccctcggtcggtctcggtggataataataaggacacgcctacaaatcanggcgccttattttattnnttttaaaaaagccaggcgctgtttcaccaagtggatcaaaaatctttcacttaatagatcgaanatattttaatcttntanaaagctgatacacaaccaaatcacctcat

SEQ ID NO: 77554 - DNA, 454 bp, Oryza sativa
ctaagcttcggcagagctgggctagcattatcttgaaaccggttgaggagttcttgcatccgtcatccgatatatatgcgctgtcacgagcatgtccaacatgatcgccgccgagataagccttgcatgcatccataatgtgcggcgcgcaacaagtgaagtgctccttgacaaaattctcgaaatgctagatcaaggaaaagaaagaactatcagtatacacatcttatttcttaaaggggtgactcttacagctgacttgggtatatataagaataaacatactaaactcttgtgagatccagtaattcacatgaagcattacaaactaaagctatagcattcttaattctgaacagcgtttagatattggtttcacaagattccaaacttctttgaactataccaatcattctgaaacatggatgtgtaaaaatgtattgtcgaaaaatat

SEQ ID NO: 77555 - DNA, 326 bp, Oryza sativa
  unsure (1)..(326): unsure at all n locations
agcttaattgtttgtttggctggtcggacaagagntttacagaactccttgagctgtaaaggatcttgtgccagaggggaacaatttacctcagacgacatatgaagcgaagcaagtattatgtccgttgggcccggaggtcaaaagaattcatgcatgtccgaacgactgcattttgtattacaaggaatacgctgacttggatgtctgccctatctgtgggggatcaagatacaaacgagcaaagagtgaaggtgaaggaagtaagtcaaagaggggaggcccagcaaaggtggtgtggtatctcccaattgcggagcgcatga

SEQ ID NO: 77556 - DNA, 413 bp, Oryza sativa
gtcgccttcggcacacaagaaatcttgagaagaagttatacccttcgatgttgttgacatcccatataattacaacgccatcttcggtcgatgcactttgaacaagttcgaagcaatctctcatcacaactacctcaagctgaagatgcctggcccaaccggtgtaatagttgttaagggtttccagccttcagctaccgcggtgacctccttcgatagggaagttcataccttacaagtcgaagggcaagatagagccataccaacgacgaaacctgccccacacggcaagattttccagttgcagatagatgatactgaccccacaaaagtcgtatcactcggcggagacctaggcgaacaagaagtgaatagcatcttggccgtgctcagtaagaacattgatatcttcg

SEQ ID NO: 77557 - DNA, 335 bp, Oryza sativa
  unsure (1)..(335): unsure at all n locations
caagcttgctttttctctctcttctcgatattatatatgncaccgcnagtgagctcgctagccctcctccacctcaatcctcttcaccataaaaggaggaaggggcaaatgtaggtgatggatgtcattatccatcattgggttgagcggccgcaacactgattcggtgagacgattacaattaataagtgaaaagcaatgactcgtcatgagagaggggagaggttgcatacaacgagggagatgcactacaccaaatcctcacatctctgacgagatacctgtgacgggcaatcgaaatggtcactgatgaccggcacctctgacgggtcata

SEQ ID NO: 77558 - DNA, 432 bp, Oryza sativa
  unsure (1)..(432): unsure at all n locations
agcaccacattcaaagcatctgattggtccactttttttcctgtacctaacattatttatagctcgagaaagactgttagtcagcaaaaccaagtcctgctcctcaaactgttcgagttgctcatcggacatggcattaaacaatgcaagaatagaagacttcgatgaaaaagcaccaccatccaaagaagtcaaagaagaaaccaaagcactagacttaatatcaactttacgagcaagaatattcatctcatgagttttaagttttgtgtgaagcgaatccaaagttaaagtagacatatcaacatactcttgaatcgatgtaactttcatctgccanatagacatgtcaagaccattcaaaaagtgatgagaaacctcagattatatgttattaacatcatangaagaatcaacanatctaatatcact

SEQ ID NO: 77559 - DNA, 382 bp, Oryza sativa
  unsure (1)..(382): unsure at all n locations
gcaaccactcgacccggatcttaagcacctgctgctgcagcttgtttgatctttttaatcatnncttcctttgttagcctcagtatatcaatgttgntgcgctcataatataaatgattcatctttacaatgcactataaatgaagttcaataaagctattttagctattcttattgttttatgtaaagattaaaatgatttatattacgaataagagggagtatgagcaaccattttttctatatgaaagtataacctttgtcctctgcactaattaanaagacacacaatcatatttgtgtacattacaatttaaaccggtggatggaatcgtatactcatgacattatcaccacaataaggttatgttctttagtatgg

SEQ ID NO: 77560 - DNA, 243 bp, Oryza sativa
  unsure (1)..(243): unsure at all n locations
acatgaacttccaccttcacaagtcatgcaaagagatggtggataactaagcaaaaagaagtatgttggttctaatcttgtaagaccatgtgaatggccttacaaatggaactctttgtgcatacaacacaaactgtcaaaataattgacataaaatgcagtgcttggttaggaataccaatgctacanggaanaaaatcctgatcctgaaatgaattaacttcccaaattataaaacatgtg

SEQ ID NO: 77561 - DNA, 370 bp, Oryza sativa
  unsure (1)..(370): unsure at all n locations
agctngctgtcgtacatctcacttatttctagattatgtganaatgaagagctacaggaggctgggcgggtgtgggatgacatggttgaacgagggtatgaaccaaatgccatgacttatgaggccttgatcaaaggattatgcaaaacagggaagccaaatgaaggggctacagtctttgatgaaatggtgtctaaaggttgcaagccaagcagccttctttttcaagttntggttgatagtctttcggagccaagacatgaggataccattagaaaaattcttgaaactgcagctntatatggtcgggatttcctggatggtgattctttgggaaattttgtcatgaatgtggtatatgcactgatac

SEQ ID NO: 77562 - DNA, 451 bp, Oryza sativa
  unsure (1)..(451): unsure at all n locations
ttcttctgatagctgtaccatatgttcttgtacctattcttgctaatggattcaatgggctggatttcagtgtgggttggctttcggtgggtggaaatggattgatgcagctaatggataagggtggattggatggagatgcagaacggttttgattgcattggttatggttaagaaagtattggattggttttggttaggatagctcagatagattgtggattcagtcccatgggcattcattggattgttcccaatatccggtcttctttctgcgacactggcaggtgaaagccacggctgccgcaccactgtgctcaacgccaccggtggctcaacacatttctctacacctactgacccttctgagcanagtcattgcggcggatgatgagtcgacatgagatcacatggtcatcatatacttgttgcgtcacttgcattgcgcaca

SEQ ID NO: 77563 - DNA, 441 bp, Oryza sativa
  unsure (1)..(441): unsure at all n locations
ttcttgtttatgattaccagatngcaagatgacaaggctgccatgcagatggaagctttacattaccagcggatgatggaagaacaagcagagtatgatagtgatgcgcttgctaaagctaacgagctacttgctcagagggaacaacaaatagaggaattggaagctgagctcgaatactacaggatgcagtttgcaggtggaccaacagagaaacaatccaatcaggtctcctttaatgaagaanacattgccgaaactntgcttgatgaaactggtcttgaagctcctgcaattaccacaccaagtggtataaattcattagtgagctntgaagaggagagggcatatatagttgattgcttgacgaagctggagcagaagcttcaatcctacttcaacaacagtactaacattcacttggtcaattcagatgtcata

SEQ ID NO: 77564 - DNA, 280 bp, Oryza sativa
agagaaattaagaaaaagaatgaatggactccaaaattcttttgcacgaatacatgtggcctatccacaacttgatcgatcccccacaaagagcgtactaacatcagtagtaagttgcacttgcttcccctatataccctgtaaaactgcaatcatgaagcacaccaaaactgcaccttaatcttcaaatcgcgacaacttccatatctgtagtgtacataggcagaactagcgagtcgccaattgagcttcaccattgaagatcaatcacgtaaaatgt

SEQ ID NO: 77565 - DNA, 375 bp, Oryza sativa
  unsure (1)..(375): unsure at all n locations
ttcttgatttcnttgctgatgccanggtagcaacaccattgtcactgaccatgcacttggacagatcgagctcagcaagctcagtgcaattctcggagatggcaaagaggctagcatcggttatcttgctgcagccctcaagactaacttgcttcagagattttccatgccccttcaccagggtagaaacagctgcatctgtgatgttcttgcaaccactcaaatcgaccttgactagaccaccctcggaagagttgatcagtggaagaagcccacggtcagtgacctcacggagaccactcatatcaacctgctccaagtaagggcataccatccccaccacagccaagctggcatcagtgaaatccgggcagt

SEQ ID NO: 77566 - DNA, 345 bp, Oryza sativa
  unsure (1)..(345): unsure at all n locations
ctagtgggtcatcttattccctgtcccataatatcatggttccaatganttcaaatttgtcccaaaatatataagggattctagagtacctacttcccccaatcaaccacccctcatttaattttcatccaatcttacccccaaccaccttcccacaatggatcccttcatggttcaagaaggcgctagtcatgcctatgcggcggctagtgggtgcctatgtcggatagtcagatccaagaaattagcaagcataacatgaaaattagttatataacaccaatatagcaacttaataccacccaagcaagttcatctacctaatgcaccatatatggggtgcct

SEQ ID NO: 77567 - DNA, 458 bp, Oryza sativa
  unsure (1)..(458): unsure at all n locations
atcttggtgtgttntgttgacggncgnttaccatcagtttcgcctctcaatattaccaaaataaatgagaacaagttatgcttgcaatgcatattatgtgaaaagaagacatattccactagcactaggctttctaacctcttgtagagaataaacataaaatggaggcgaatcggcagcaaaatggacgatcaatcaatcgggcactgtcgagaatcagacttacaaacaagtgggctgagaacactaatttgacatgatcaaagcagctcanaattcacaatctacatatgggagcaagagaaaaggctgcctacagaanatgggctangaatgtccagcccatggtttgcccgaaccccacccanncgctgtggatgcaagggtgtggntnttcttatcgacattactagaaatataantcccagcagtggtacatatataccctatgtatatta

SEQ ID NO: 77568 - DNA, 435 bp, Oryza sativa
  unsure (1)..(435): unsure at all n locations
tgttgagctcttctcgtatggcttgttntcgatctggtgcaaatctccgcagttnntgctttactggcttggcatcgggtcgcaccatgagtttgtgctcaatcacctcccttggtacccccggcatgtctgacggctaccaagcgaacacgtcatcattgtcgcggatgaatgtgatgagcgcgagttcctatttctctcctagtgatgccccgatcttaacggtcttgttgcggttggcactggagagtggaacgatacttaatgcgccgtctgggttccggcgtcttgtttgtcttgctcactttcttgggtggctctgctgtggcangtgggctgggcgtgttctctaccatgtcgatgctacgcttgtcacattgcactgncagcttagcattcacttgaatagtgantgttcccttcggacccggtatc

SEQ ID NO: 77569 - DNA, 416 bp, Oryza sativa
tgcaagctttcttaaaagatggaaaatttataatgggatttttttattaaaaaaagaagatggagaggaaggagttggaattgttcatttgtttgttagtactaaatgattctggcatggctttcaggtggaactttcttccggaaaagaggttgctgatattatccctcaacattaatgaaataaaaaatgtgatggtagaggagttattgttacgggaccagcacctgctggatctgattatgacttcttttcacgattcttctgcccaaaatttgggatagatgaggtatgccgattctttccacccaacaaccaagttttttatgcagacaatgtggcttggtaagttaaaaatggcccatttagttccagaatatgtagatataatctcatatgtgggtacacttttagtc

SEQ ID NO: 77570 - DNA, 398 bp, Oryza sativa
  unsure (1)..(398): unsure at all n locations
ctaccacttatgatgttatctgattaaaaaagggtactcgtgtatgaatatgacgaactaacaataaaatatgtgacatcagaaaatgagtatcttatgatggtatatccaatttactcattgtactaaatgtcatggaatggtgccatactatgttgtcttgtgaggaaaaattggctgcacttaaactaaaatcagtatgcgttattctgacatttataaatcaagtcactgatgatgcatactgttgacanactatttggaggtggttatatgcttaacaagaaatangatgaagttaacaaaaccaaaatgcatgttcagcatacatcttatatgacagaacatagttatccatgtaacatgttaatccatatacatgaacatgatccttaaac

SEQ ID NO: 77571 - DNA, 428 bp, Oryza sativa
  unsure (1)..(428): unsure at all n locations
agcttaactgtgacaattgactttcaccaagtatggatccgtatgaacgcgttggcggagaatattttgaaacctgtggatcccaacttcacggaaactcaccctcagtttttgaatgaatataggatcaaaccattttatcagtcagtcggtgctgtggacggcgcactgacgatgggtataaccgggacggtcgtaatagtaggtccgttatccgcagatcgttagagacaatttaatttaaattcaataaataaataaaaatcggaaattgcgagtccattacttccagaattcatacatttacatagaaattctgtaaattacatctncatagagaaataccctgattaggaattccaacgtataaggagaaaattacatgaccacctataagctaataagggatatctatcctaaaagctctg

SEQ ID NO: 77572 - DNA, 293 bp, Oryza sativa
tgctctcctcctgcttcggcatctcaaacttcaaagccctttctaactgcactatatgagccctttgctggtcacagattgcccgcagttcttcaatgagtatgctatcttcatccatcttttcttgatcctcatagtcctatgaaaaatagtgtgtcaataagcataatagcaccaatatttttatacagcacagcatgttaaatatgcactatctggtgctgcaagtttgaatcagagcaaacagatatagcaagatatcacactatcttattaggtggttacaaaattga

SEQ ID NO: 77573 - DNA, 308 bp, Oryza sativa
  unsure (1)..(308): unsure at all n locations
tgcaagcttgttatctatatcttctttcaaataaaactcttcacatagtctatattctcatgcatatcctataaatctgtagctatataattcagaanataaattgaagtcaggagctagaaaaccaagatttttcggattcccgtataaaccgctcgtcagaatttaaacgcaggctattaaactcttgccgagagatgcacttaataattcagaggcagatgatgtgtagtttcaaccacgatgtcccgtgttcaatcctcagcacgctcacaatttcttcttaaaaanaattgagtgaaatatat

SEQ ID NO: 77574 - DNA, 366 bp, Oryza sativa
  unsure (1)..(366): unsure at all n locations
gagagatataggacatatttagcaaaacatgcctgttggatttctgttccttttctcctacaatctgtatataacctatagagtttacctacaaaatttcagtttgcctttccacgcatttagtttacacaccacattcatgcatgaggatacttataagttctaacttctaagaagtcaggaatatcatacgaaacagacatatgaacagaccatgactatgcantcttgtcatgaggttcgctaccaaattaattacatcatacaggtttgttgttaagctccctctataaccaactgtaatcacaaacagtatcataaccaagacaaaaaattactaagacagttgcggatacatactacatt

SEQ ID NO: 77575 - DNA, 467 bp, Oryza sativa
agcttatttgtttttcttcttacatccattgtaaactggagttttggagtccttcaccatggttgtgaacttgcgatattccctatcatcagtgtcaaatctctccccgtcgtgtagcatctgatctagattaggttcaccgtgatcgacacatgtttggttatcctcctcgcagccaacatccgcatcatgcccgtgacatgtgccggcactttcctcacgtgcacctcctcgccaaggaagttgtccctaaaacccattgtaaggagatgtgaatttacccgtgagccggaagttgtctgtctttcttgcattcatggcatggacaccaaatatattccggtgcatcaacaagatgccgtacttccctgaaatactccacagagtcacgatccgctatatgtatccattctagatccattatatccaatgggtacctgggcataattatcgttattaccaatcgt

SEQ ID NO: 77576 - DNA, 468 bp, Oryza sativa
  unsure (1)..(468): unsure at all n locations
tattctaatgtgaccttaattatacaatagcacattggtcgagtttatttgtataacaatgtattntacaaggacatgtttaatctattattccataaaagtaaattgatacttggtacaatattgacctaaatgtttaattaaacactcacataaacatattgtatgtataaagttcaatttatttgcatgacaaattattttacatgagtgaatccatcccatgagagactcgatgaaagttataaatattaatgtaatgattctagtggaacactcctatatatataaaatcattgtagtggcgactacttcgtggttacttagatgtcatgacacttgtcgacatggttcaagtatttaacatanaaaattgtaatattaataattgactcgtgtttaattggcttctatcatgtcacaaatattataggataataataatatctattctaatactcttagtga

SEQ ID NO: 77577 - DNA, 397 bp, Oryza sativa
  unsure (1)..(397): unsure at all n locations
agcttctctttccgttcaacaatatgtttcccataggtgtatctctntagtgcattcaaatgtactttgatacgtgaaaggatcaattcacggttctggtcatcacaagtctccaaaaccttctgcaccacgtagttagcaaactggtctttcatcattgcctggagaagaaacaatngctttaatcattttagaggaatgtgagccatgatatccaccacagcaacggtatcattttagaaaagcaatatcttattccaagcagtatgtttcaagaaacactaaccatattaatatattatcacagcaaagcctataactcatgataattctacgaacggaaacgatacacttacgtaactggatcataacatacctgtaatggctcattctcgtc

SEQ ID NO: 77578 - DNA, 255 bp, Oryza sativa
  unsure (1)..(255): unsure at all n locations
tgacttgtagagtttgcgatcttttatcttngtgcaaaatagcagtaacaaactcttcttttntntttgcggnggtaacaaactcttgatttagtatgatttcagctactagtacaaggtttatcctaaaactaaagaggttaacttcaacaaaacgcatttgacttggatgggcgtacatcgcgataccaagcacctacagtaatcctgattcgtaagaaaagtcaatcagcgcagttgctttgaattactact

SEQ ID NO: 77579 - DNA, 396 bp, Oryza sativa
agcttcgtggatcacatacatttagtagaagacatcggtggatgagaaacaccatagacaacaggtcgagactcatatctcaatgtaaatcgaatgaccaaatattcgtgtcatttcatcaagtaaaagcattttgtaatagcataatctaaattaagatgctctcgttttagtgcttacgagataccataactagacacgttaactatagttctagtccatcaagcaagtagaaaatatattcctatcacctatgttgcaaataatttcttttcttaaactactcatatgatctacgatccgatgacatggttgtgttcgtaagaaataaatctttattacaagttctcacatgattatatcttgatgataaattacaaattacttctataatat

SEQ ID NO: 77580 - DNA, 456 bp, Oryza sativa
  unsure (1)..(456): unsure at all n locations
attttgtttgagtgcacaatatgtgccatttgtaaaattaatgagattaaataattagtgcggaanattttgacataaattttgaaaataaaaaatgtaataaattaaaattttatttgaatcttntaatagggcaatggattttttttatcatgagcattcataaaaaaataccgttgacgttggtagtcctatgtttgtacgaatactcctcaattgttatgactnttttaaaaaataaatgcatatgtttcatttcatttatctaaaaataaattgtcataaataatgtatcgcacagcatactcataactataatagtctcatgcgacaaacatttacattntcaattatgtaactcataaatttctatgttcatccaaagagtaaaatggtcatatagaaattagacggcagctgacagaagggacatggaagatatcannaatcaaattt

SEQ ID NO: 77581 - DNA, 422 bp, Oryza sativa
  unsure (1)..(422): unsure at all n locations
atatgattcccgaggttaaagactatagaaaccatctaagagatcaactgtcaaaggtgaatgcttttacatattttatatatttttgtgctcgtgtatcttggataaattaagcaacatatagatggtgacaattcttatattctggggaacagtatatagttcttccagcaggatctgatattgacatagctaatatgctcattcttttcttctgggaacgaaaattccaaggtcaggtacagcgaggacatataagaatatactactcgnatacggagaaaccgcaatccatagataatgcactacagactgcattctgtttcttatgtggctagacatatatataaactttattgttcctggatgtttagacgctgtgttggagattcngatgaatcaaaccatcattaattggtctc

SEQ ID NO: 77582 - DNA, 355 bp, Oryza sativa
  unsure (1)..(355): unsure at all n locations
acgtgtgaccagccttttttgcttcattgttatgaaacngaagtaacataatgctatggaactcagctcgcttaaacgctaatactacactctaatgccataagaagcgggtgaaagtcgaataattcaatctaactcataaattggacaaacatgtgttggaaaccaggtagtgtggcctatcctaaaaacttttgaattgagcacttacggccatgaaggttacctcgcttgtagggagctcatcatatcttatagcttattgcttgaagctcgagttaatggatagtacatgtgcggattccatattacctcttaataaatgactaacacctttacatagattggggacatg

SEQ ID NO: 77583 - DNA, 379 bp, Oryza sativa
tattttttctttgtggaagctgacagagcatcacccgccgcaggcgttggggtcagcgggaggtggtggcggtgttgcgatgatgatgagcacggtgccactgaggataaggttgtggcagcgctgcgaatggtggagacggagatggaggcggcagcgatggcggtgccagtcaccgcctgggtcagagttgtcgtatctatgcgggagctagcgacggcgaggcttgtggcgattgtgtcgctggatgtggggcccacattggattcatttgagccaagggcaaatttgtcttttatgattgtttctctctcctattcctccgaaaataattatataatgtctcgggagtcagcagctattatcagattttgcgatg

SEQ ID NO: 77584 - DNA, 493 bp, Oryza sativa
  unsure (1)..(493): unsure at all n locations
aagcttctgatgganagaactacatttctcttntgtgttctaccattgtgtctaaggtttctaatatatgtactaaacagttcattataagcctgtcactatantttntgtatatgtagttgtgtgtatgatgaaagaatattgttcaatgtcaaacagaactatggccctttgtttgataatatgcctgctggcattgttggatgaccagtttagttgattgacaacaatggcacatggattgatctctccaacagttcctggtcatataatgtgcacaaaatctctatcacattgtcaatattactatttaattatcaactatatttctatggatattgttaagactctcgatgacgtatggtattatgaaatattaccagcaaatttttcccttgattcaatagattggttagattaatgaatactccgcatcttaccaacttgagtaccctctaagagataagtggagcacccctaatatatgtttcta

SEQ ID NO: 77585 - DNA, 459 bp, Oryza sativa
tttcttgcttatatgtagaaacatttggaaataaagtcacaaatattgtactcctgaacaacaggttccaaagaaataaaacaatggtattaaatcaacatgctagatttatttaattgcagcacgactaaataaaacaatattgcaaaacttgtgctggtaaatgagccacttgtacagacataagatgtacattactatgaacactggaataaattttgaatgagaaccactaaacgagattatgaagtgcatgcgctattattttgtgtcaattaatagagaacgtgatgagaacagatctatttctccaataattttagagggcatctatgggtaaccatttggctaacctaaggcaatgaggctctgatccaaattgtccgccacgaattctatccaatatcaaacgctacatgtgtggaaccctcgtccagaatcagccgtgctcacataaca

SEQ ID NO: 77586 - DNA, 418 bp, Oryza sativa
  unsure (1)..(418): unsure at all n locations
agcttatattatctcatcttataaattaaaaagaaaattattttctttctattggaaaatggattaaaaataaaataagcgtcatcttaaaaattaaaaataaaattattttctttttagtagaaaatggattaaaaattatagtagctgatcttaaaaattaaaaacaaaattattttctttctattataaaatggattaaaaaaataaaattattttcttcctattagaaaatggattaaaaagaaaataagcgatagaggtagttattttctttctattagaattagtttctttctattagaaaatggattaaaaagaannataaaatattctctttctattagaaagtggattaaaaatnngtatttatttctattagaacatggattaaaaagaatatcaaccgtggataaaa

SEQ ID NO: 77587 - DNA, 435 bp, Oryza sativa
ttgacatctacggtgaaattggcattcctaactctactgttagacagagattctgcaccttattcacatgtttcttgtcatgtacagtttgtcctatgttgtatcagactgatttgtaaatgaccatgcatgtggctgtaaatttcctacaaccaatatgtgcaccaaactggacaaatgtcattttcagcattgtgccttatccaaaataactaagtatatcttccatgtacttgagcattcttatggcttcttttatgtccactggtgtagaacaatcaacactccacttgacagagtctctgtttggggacacatcgttattcgaggttcttaagttccctggtggaataaccattatccctccacaatcttgctttcttctgcagaagccttacgcattcttcaacttcactctgaacttcccaatctata

SEQ ID NO: 77588 - DNA, 422 bp, Oryza sativa
  unsure (1)..(422): unsure at all n locations
agcttcacctatattatagggatntctttcttcatttgaaccagcacatccttgttaagagttctgctgcacaatttcctaaaaaacatccccaactcagctattgcttcataaatatcactgtccagaaatcctctcatggcagcgggcaaaattctttgcaaaagaatgtgaacaatcatgtgtttcagcccctgtaccgttgttccctcagcatttaaacatcttgagatgttggaagcaaatccatctggaaacttgacctcttgtaaaaaagcacataaagccttcttctgttcagtagacaaggtatatctagcatgaggcatctctccatcctctctaaatngcagctcctttntaatacccanatctttcaaatcaagcctagctntagctgtgtcttttgtcttgcctttata

SEQ ID NO: 77589 - DNA, 417 bp, Oryza sativa
  unsure (1)..(417): unsure at all n locations
cacactacacactatactctgttctttgagaaattgcagattcatttcagtagatatatattatatatatttataggggaaattacttttaattcggtatattatgttgatttgatttgtctaaattgggctacacatatttgtattttcttggatcaagttgtttcgtgaggacttctgtctatattatagtaaaatntttcagtccttccgaaagtctcaaggtagtttcctctggtaccaaatattggatggtaaaaatgctcaaaatttatactaaaaattgtggtatctcgatacacctactacctgatactacaaaatatggtacatcccttaaggatggtaaaatcacttttatatgcatgcaagtccaatgtataatcaaacatcatggntctggggtgaaaaaaaact

SEQ ID NO: 77590 - DNA, 476 bp, Oryza sativa
  unsure (1)..(476): unsure at all n locations
tgctgcatgcaagcttcagttgtgacatgacgaacagcgaggcacaacaaatggtcctggtaaagtcatcgctgaaagtgttgcagaggctcacaagcattggaggagagatcggcataacactgcggtacaagatattgaaacatcccttcatgttaagaaacctagccgagatcttgggagacaaccattgaccatcaagaactaatgaagctcgtggcaggaatcctcagaaaccttgcctttgatggtgacacaggcagaagattgggcacatgcaggtgctcataaccaggctgacgaaggcattcctcaatntagatagaacctcaagcacaaatgttgattgcttgctaacaaaggtagccgggcaagaactggcaatgctggcaacagataatgtgcacaactgctttggtatgttgaaagaaccagaagttatcaataaactcatacatatgatcctgatccatgat

SEQ ID NO: 77591 - DNA, 154 bp, Oryza sativa
atgtattatagaaatggaattccatctatccatattcttgtcagccatacattgcaagaccaggatactgtgcatgtatacatacctcgtggggtataggaaaaatatcgcagtcgcataacgaaaatcgctcttgataacggacggatagcca

SEQ ID NO: 77592 - DNA, 289 bp, Oryza sativa
  unsure (1)..(289): unsure at all n locations
agcttgggtgtgtgttctccgcacgcgggagggagcagccgtagccgcctttcccccaccctctacacccnctcgccggcggcgaacactgcgcgcgatgggaggcgcgcgcgcgcatgtgaacaagccgcacaagacacgcttcgcctncaaggcgtcgcgccacgcgcacaagatctgtacggcgcccatggcggtctccccttctccttctcctcgtcctcctcccgcccccggcaatcccattcctcttcttcgttgccttacgctgatggatggcggcgtcttt

SEQ ID NO: 77593 - DNA, 330 bp, Oryza sativa
  unsure (1)..(330): unsure at all n locations
actattatccatgttctttatttaataatgataatactactttggtgttctctggtttctactaacaatggaaggttacaacaacttggggtatgagataaagttggatgggagacaaaccatattcgctacatcaccttccatgaatgcacgtgatgtaagtactntggtgcaacaagtgctaagttctcaaatggagaaagtggaacaaaagcagtgccacaatttatttcagacaaggtttgtactaaagaaataaactcgaaactcgagctccggttttctcggaagcgattggatgggcgatcgccgatgaacttcatggtgaca

SEQ ID NO: 77594 - DNA, 416 bp, Oryza sativa
  unsure (1)..(416): unsure at all n locations
agcttgccttatcctctacaaaatttcttatcatcgtgaatatccttacatgactagaactgatgattcttatcttttcttctttgtctgcacagtgtgagctcgacattatgttccatctggagaaggtgcacttcatgctggaagagatggtgatgaatggttgcattgtcgaaactagtaaacagaacatcttggcaccaatccacctgatggagaaaacttcttagaaaaatgctatccaacaggggagtgcctcatactgttctgcttatcgccaccgcctctgtgcttctatagattnttcatctcaatgtgtaaccatcaacgatttccatgtgcatagactattaaacttgacctgataggaaataatgagaatatgacagatgacgtctctgttctttaatggtatc

SEQ ID NO: 77595 - DNA, 205 bp, Oryza sativa
  unsure (1)..(205): unsure at all n locations
tattttcgtccgagatagcattttagcatttatgcaccggttgaaaaggataatntagcgaaacccatctccacaatgacagttttatcataaccaaactttttccctttttgcaatggtataatatcaaatttctacaagaggcaaaatagcagccaaggttctaacttaactcgatacatgtacagaacaatactcctacttt

SEQ ID NO: 77596 - DNA, 446 bp, Oryza sativa
  unsure (1)..(446): unsure at all n locations
agctntcagtcctctttccatatctaatcataccaattataaatatatgttatttactctgtctaatggaagagaaaaaaggtttgaaagtaaataggcaagtattacaaataaaataaaataaagttttttaaattntttttccgtagtaatgctttaacaaagcttaaaatctttatatgaaatagggtactacaggttaattgttcctcaaccttttcaaaagtcattaaatagtttcttctaaatgaacaagtgtatatatttttttctaaaaaaagtaaaatattgcatttgaaactcttaacagcaacaacaataactatataaatatgtaatatgtactactatagttgtntttcacgggcacctgatttcttgatagganacanggaatggaaagacataaaggangattgggaatgttaagnttgtgcactttcatc

SEQ ID NO: 77597 - DNA, 267 bp, Oryza sativa
  unsure (1)..(267): unsure at all n locations
gcttcgggaagacactgagcattgcacgtcacccgttgatcaatcgcccctataactgatgtagtacatattatcttgaccgcaacttgcattattagaatcacacacttaacttgcttggcctcggtttgcgtgccaaaccgaccgacctacccagtggtcacactaatttccgtatgtcgcactanactgataccttgtcactccaaccttgtggcaccatccgatatactgctatttatcgcgtataccatatatcccacatac

SEQ ID NO: 77598 - DNA, 445 bp, Oryza sativa
  unsure (1)..(445): unsure at all n locations
tttctttgtttagaagttgncngccaggagtatgtngtctggcttgatatctctatgcaagatgtacgggtggcattcttcatggaggtatagaagagcattggcgatatcctttattattatgaacctaatatacatatatataaaagaatttaataagttgtaccatatatatatatataaatatatatatatatatatatatatataaagcatgcgtgtgtgtatattagttagttaccttgttgtccattcgagtactccctcgtgtatgcgtttagcaaaggttgccattgctcaccagctcatacacaaggaaaagctatattcttttgtcatgcctccaccagaatatgatatcaacaatggtgaacctatnttgcctgcaccagccaatgagcctgacaagattcttgtgcttcaccccaccaattgagctgagctc

SEQ ID NO: 77599 - DNA, 343 bp, Oryza sativa
  unsure (1)..(343): unsure at all n locations
gccctagccatattggtagctcggcgacccgtcatctactttctccactcaccatactttggaagcgacaaaccttttgccaacttttattttttatttggaaataactagncaaccgaatatacagttcttacatgtactacatggctgcgtgcaaattctacaaattgttggctcgaattaattccaacaatatatggacttcaatatttatactaatatatgatataagagaataataaaccgatgagttgctgatatacacattataaacctgagtgaacgctatggattacatacgctactgaaagaccaactgtacaacgacgttgtctggatatac

SEQ ID NO: 77600 - DNA, 474 bp, Oryza sativa
  unsure (1)..(474): unsure at all n locations
atcttntattccactagctccttttctccatatgagatataatcgacgatattgcttatctgcatattcaaggcagacttggcttcatgtctgctaagaagttcgactctatatttacattgcaatttcaattccttcactaattntgtttgctggatccaattgtactgtgataatggaacaccaaataatatgctcagtttcattnttgagtgttgatttggtcaaatatgctgactttgcttattcatatatgcagataaattatcagttctttttcagtcctggacaattacttccgctccccagtccggcagtcccnccggagtaactgtagaaaccatgcttagccgtatcaactattaactgaaggaacagagaatgacacaagtaagaagaaccttatatattcagcacctagtaaacataacttatggcagtacatttngagaaccnctctaatctatactctaa

SEQ ID NO: 77601 - DNA, 366 bp, Oryza sativa
  unsure (1)..(366): unsure at all n locations
tactcagcttaacttgttctgaatgacaatctactatattttgtctgaacgtatgctaaccagtttgtgaaaagaatattattgcttgtgattaaacctttgcatccttttgtgctctgtaatttttatcctagactaatatctaatttctagagttacgtttccatgtttataaaaaaaatatctttattgtgggctagacgtctacatttggttgcatcttattgattntatgaatatcgtagtttgcttctcctgaacgattttatgaatatcgtagtttgtttgaactttntttttctggtttataaaagaaaaatattattntgcattgaagcccgagccgtttattttctctaacgttca

SEQ ID NO: 77602 - DNA, 373 bp, Oryza sativa
  unsure (1)..(373): unsure at all n locations
ttcttcgttaataccttgagcaaagcaagtcaccctttaatcaattgctcctataattggaaagtcattattattttgtctacaacttgcattattagaatcacacacttaacttgcttggcctcggtttgcgtgccaaaccgacggacctacccagtagtcgcactaattcctgtatgccgtaccaccctgattccttgttgctccacctttgtggtacttcggtatccgtgctctctgagcgcatatactaactattccacatacaccattgtttgtcgataatatgggaagtgggtttgagaagccttgataacccgacatgtggtgttggcgtgtntgaaaataaaataaattgtgaaaactcacgatg

SEQ ID NO: 77603 - DNA, 477 bp, Oryza sativa
  unsure (1)..(477): unsure at all n locations
acacgcacgtacgccgtgcgaaagaccggtgtattacacatgatataacaattatgtgaaacttcatgagcaattcacatcctctnttttttaaggatcttgcttgcgagatgctactactagtaattaatctagtactatacatctatatactacaaagactatccaacgtttcgcacgatttaatcagcatttgaaacagtaccccaagtcggtcggtcgtccggtgttgcttaaactaaaaacaaggataagatacatataatgcatttgttataccgttcattccaatcctcttcgcagcactgcacaagacatcgttttcttatttaaatggatgatcaaatggctaattatatgaattggattaatccaatggctgacaatntcttgctacctaaatctcaagtattggntataggatatatatatcgatctatactattttagaaacggagtcatctttcgtctaacaac

SEQ ID NO: 77604 - DNA, 315 bp, Oryza sativa
  unsure (1)..(315): unsure at all n locations
tttcttttgtttactcgtggcacgctnttctaaactgctaaacggtagtttcatgtgaacactntctatataaaagttgttctaaaatatcaaattaatatatttttcaagtttgtaatgattagaacttaattaatcacataatattatcacctcgttttacgtgaaacacttaatcttcatcttaaaaggaagattcaaacaccacctaagtttctctctcctgattagtattcccagaggtctcctttgccttttgtgccgtatttgttttggctatcttgttttcccaacatctaatcgagaatactgtgt

SEQ ID NO: 77605 - DNA, 307 bp, Oryza sativa
  unsure (1)..(307): unsure at all n locations
agtgtacatccactgcagtgtgagtaaaccaaatctattcgaatatccgtgctcgcggttattgatcatcgggacatgtattacacttggctagactctaaatcctttaactggtgtgggatgggatattgcatgatgatttttatgctgatggagccactttctgagaggcgggaacgtgtacgtactcataaaaccataacgactcaatggcgggaagctatactggggatcacaatggatggtggacagaaccgtcattgtntattatgaacactggtaataaaacttgatcagtctattgtca

SEQ ID NO: 77606 - DNA, 426 bp, Oryza sativa
  unsure (1)..(426): unsure at all n locations
agcttcactattttnttcatttctctaactctgctatatacatgtacatatgagtagtatatgggcctcatgggccaacacatacataactcaacattatccatacatgcaaaattcagcaacaaaatgataaattttgctatgatgaattgctgacccttttttttttgttgcaagaccaagatttattaaatggatcctctgattctggcatgtggattgtccctattactttaggatgcaattcacatgatatgcagaanagattcttactgaaacataaattcagcgacataaagggcatcaattcacagtacgatgaccaagaccgacagaatagtggaaacttctggattaagctgaatattgatgaaacacgatcttatagagtcaaatatgatgatgaacttacaactgcacttcgaa

SEQ ID NO: 77607 - DNA, 388 bp, Oryza sativa
tcaggttgtcaatgttctcaggcagagagttcacctcacaggacttgatacccatcattcgtattttggtaagttcttcataccagtacttcgctacagcagtaagtatgtaagtctcaacaccatggcacacaatggatcgcagcgttttgtacttgcataccattattatgttggtttcactgagactactactgccaattattgaaagatggcgaacgccttgatggaattttgtcagatcagtttcgccttttacaatgaagcactcgtgctcagaaatcagttgtgccatatcatggatcagcttatgcataacatacttggaatccgttgggctgtttgattccttctgaagaagggatctatgcagtagatcctcaaaata

SEQ ID NO: 77608 - DNA, 393 bp, Oryza sativa
tcaagctttacttagtgaacaatcagtttagaagttgaatgataagcatatatagtttcaacattgtaatcattaaccaagatggcctaatttgtttttaccacaccatgtagtaaatatcgaaatgctgaccccttacacttgaaaatgcactaatatgacagatacagaagttagcatacgaattacaaacaggttaagccactaaatcattttcacatctaaatctgacgggagaacggccaaagcaaccgttatgaacctaaattatttgatacagtcgaaaatgagttccacttgattcttggcctcgtcaatcatcaaccgagtacaatgcttcgaccagccaatacataatgcattgagatatatgtaccctggcctcgtcaatca

SEQ ID NO: 77609 - DNA, 467 bp, Oryza sativa
  unsure (1)..(467): unsure at all n locations
agtcaaagaggatgtcgtgaacaagaagaagaacatgaaggagaatgagaagaagatacattgcattgcagtggtaattcaagaacctcataaaatttttgatggatctgaagatgaagatgaaggcaaagggtagcaagttgttgatctagcttttattgctcgtaatgcaagttctgatggtgatgaatctgatgatgataatgaagaanagcttagttatgatcaattagaatatgatgctttacaaattgctatgaaacttcaaacatgttctattgtgcttgatgagaaggatcgtacgatngagattcttaatgctgaaattgctagaataaaatctgtgattcctaaagatgataattgtcaatcttgtgaagtnntatttctgaaataatgctttggatatgtaattctgttattgcaaaaaatggaattgaattganaatctanaagtggagtctctt

SEQ ID NO: 77610 - DNA, 461 bp, Oryza sativa
  unsure (1)..(461): unsure at all n locations
agcttcctcaccgccgtcgcgacggctcggcctataaaaagctccccatttccgctattgtccaccacctacggaacataaaaaaaggctggggtagagatgggacgggcagggaaggaagcagatggatagggttgggggtaggaggggaggggatagattcnngtgtttttcggataagcccttgtgttnttcatatttacaacactacccctaagagcagaatgttctcttcttcgtgtcgcatttctgtaaaaattaagggtgttttctataaaacggaacatgatgttagtcggtgggaggacgtgcgcgctattccgtccaaacacgaggactntntttttgcataaacaccaccacgcggcatttactacgagataggttgtgcgtggcgtacatacaggacgagaccggcacaaccggtggaggaaacagcgaataataaatcatgtcaccca

SEQ ID NO: 77611 - DNA, 351 bp, Oryza sativa
  unsure (1)..(351): unsure at all n locations
atgatcttgtttgacagcagaatatagtagaaaaattgaaaagcactggattccgtgagaaactgaacttcgaccctatttatatctcaccccaaaatttttcacccgatcacatcgaacgtttgaacacatgcataaagtattaaatataggctaaaaaaataattgcacaggttgtgactgaattgtgagacgaatcttgtaagcttaattgctctatgatttgacaacgtggtgctacagtaagcatgngctaataacatattaattaggcttaataaattcgtcttgcggttactgacggattctgaattaagtttttattagtggcgaacacccatatgaacccta

SEQ ID NO: 77612 - DNA, 436 bp, Oryza sativa
  unsure (1)..(436): unsure at all n locations
agcttgggttagatgtcttgttcatgcaaaacaagcaacctccccatgtgatgaanaactgcaccggctcatcccaagtacataggtttttctttttttttttttagcctgcagatcatcttgctgcttatactttattttaccgccccactccccagcaagtacatccatgtaatacccatcaggccatcatactcttaaatggcctataattaaacccaaaaataagctgacaaaccagaagcatcctaagtaacgtgatttcatctgctaaatccaagataaacacagacaaaaatttccttctccagaaggcaccaaggaggcgagaagatagaaagaaagaaagaaccaagggcatctatctcccctgaatcccatgaacccatttcaagcactcacaattncctcccttgcacccattttcaccacccac

SEQ ID NO: 77613 - DNA, 358 bp, Oryza sativa
  unsure (1)..(358): unsure at all n locations
gtatgacggactctctcttctctgctctgtctctgcatgcatcacatcttgcttttcgcggtagattaacttctgttcacgagtaaagcaaacctttntgttgcacttgatatatttccattggccatttctttctagatatgaactcgatgacaggtagttcatatgatttgcggtttgcggatgctgccctctcgtgtgaccacgctgctagtggattcccaactgatatcccgtggtcaagctcacgtacgccaataatttctcggtcacgatggtcgatgtatcacgtagctgaaactcagttcagacgagagtacagcagtatcgatctatcaagcatacagttcccataacg

SEQ ID NO: 77614 - DNA, 368 bp, Oryza sativa
  unsure (1)..(368): unsure at all n locations
agcttgagtgtcttcatgaattgtgcagatgagagggccttcatcacctcatcatcgaagatattggcaccacacagaacaagttcacgaattgggcaagactggaagagcgtcgcaaggccctcttgactgaagccaatttctggataagaagtgtgacgggaatacactgcgagctcaacattctgaagcatacggcacccgatggctagagccttgaggcttacatcagtcaatggcatcctgaaaactctaccttgaggtcctacaccgacaacaggctcaagctgaagagagatgcttttgaggttgctgcagntctgggagagtgtgatcatgtcactgtcagttagaccaagaacaaaatg

SEQ ID NO: 77615 - DNA, 396 bp, Oryza sativa
  unsure (1)..(396): unsure at all n locations
acactaagcttacaagtnttgtaatattnttccattttgtagaatctaagactctctttcgttaaattcatgtgttcatgagttaaattactggacaattggagagaataaacattcacatttgaaaggcttaattttggcccaaaaccaaaagcactccaaatcttgtaataatattaaatagctccatcggttgctctttaatttatcgatcactgtcgaaacgtgaattntaaatcttaattgtagaatcattttgattgttttattttaagttattttagtattgggttgtaaggcattgaaatatatacataaaaaaatanttttgtaagttgctataagtattaccagttataattaggttagttgctataagtattaccgtttataatt

SEQ ID NO: 77616 - DNA, 234 bp, Oryza sativa
  unsure (1)..(234): unsure at all n locations
tgacgtcgagggaatggagaacctgccaccgaatagtagccctgctatctatgttgcgaaccatcagagttttttggatatctatacccttctaactctatgaaggtgtttcaagtttataagcaagacaagtatatttatgttccgaattattngatgggcaatgtatctcttaggagtaattcctttgcggcgtatggacagcaggagccagctggtatggctgtagtctca

SEQ ID NO: 77617 - DNA, 348 bp, Oryza sativa
  unsure (1)..(348): unsure at all n locations
agcttctgttatgtatttacaaatggccaatcagatgcttaatggtcatatgatgccacaaaatccaattacacctattcattgtattgaataggctgcattgaaggaacatttgaatcatgttcctcacgcaaaagccgcattgatgaatggccaaatgccccatagttacacgttggcgcacaatcccatcctaccttcaaatcatattgaagggtatcaagtgatggaaaatttgagtgaacttgtcacgacaaatgactatctaactgctagtcctttcagtcaaactggagctgcaaataggcagcataatattggtgactncatgcatatacatgcattgga

SEQ ID NO: 77618 - DNA, 435 bp, Oryza sativa
  unsure (1)..(435): unsure at all n locations
ttcttcctctcttgtgctgnaccgagcctcgtttcatgagctgatgcccaactatctgcagtatgacacgatcatatgggccgtgatatcactgctgcttgttctggcatggggggttggcctgctcatgcttctctacctgccgtacaaaagatatgtgctgaagaaagatatcttttccccgcaaactctatgttactgagaataagatagtgtacaaggtagggttaaccatgccgtattggtttgcttatcttcgctgcgagcttaattgtcatttcagtgctgaatgcgtgcaatttcattttgcaggctagtaggccttcatatataccgttcatgggcattgtcaagaaagagatagaagtacctcttcaatgggggagtgatgttataatagagcaagggtagattacttatatacttaagtgaaac

SEQ ID NO: 77619 - DNA, 366 bp, Oryza sativa
  unsure (1)..(366): unsure at all n locations
tcacagangaaatctgagaggcaactgtttgaatctcatccgtcattgtcatgcattgagactatcctgagatctaatatacaaatcgaccaaaagatccttatagttgctgatagagctttctggctgccactgtgtcaatagctatcatccatgaggatgatcattgttgagtttggacaaaaccctgcaacaactnttgtggatctggtgaacaagacaaactctacagcttgagtgctggaagaatactgaaatcagattgcattctgctagataacaagtaagtccatttgataaataaaccaagccaatgttctttccaattacgtgcttttcatggtcttattacanatcaacttcaac

SEQ ID NO: 77620 - DNA, 383 bp, Oryza sativa
agtcttacttcatttaacgtacttattgtccggtaaaacgtgtgctagtagtgcacgtagcaccatgtttatgaagggaatgtaatggagtttgtgggggttttgcctcttctcttcgatcctggttgtcctgagcgcatcggacgctggctgcctcgcggtcgcgggctggtatggatgtgacattattccgctccgtgcatgcatgtcaccgttgcgccgggccacgctttggctagtcgtaccactagcatgtactccatcatccttatgattcaagttataagttgttttttttggtctcgcaacaagacgtcgcaccagagctagcgcaggcgagatccgttgaatcacagcgtggcacgagcggctagctacatggt

SEQ ID NO: 77621 - DNA, 258 bp, Oryza sativa
  unsure (1)..(258): unsure at all n locations
tctcggtagaaagaatangttcataaaaagtttttgcagcttcctctgatatactatngntcatcatatatagntcttcttctttccaagtgtcctgtgatttcaggagctcttcatatgctctgacgcccttctcaccatangcattgtcagagatggtcaagtatctcaatacatcaccttctaatacttttgatgagatgcgcatcacatcaaaggccatcctgagtccttctagcaacaaaatcagatatgtct

SEQ ID NO: 77622 - DNA, 363 bp, Oryza sativa
  unsure (1)..(363): unsure at all n locations
ttctttgtctatctataatctacccaattatctggttagaacaccgctatcttctagtgtaactattttcaattactacataggatacgcatatgtagctattgggaaatcatgccataatcaggttttgcaaagtcgcacgattatcatgtgcggtaatcttctcagttcttaaaaccgtggtaaatcctcacgacaaccacacggttttcacagtaatcgcggtaaccgtcttatcgtgggggtgacattaaccccatccaaaatagtttggtgaactccgatcgtaacgtaatttgtctgttcaaagagtaaagtttnttttccttcatagaagatatactacttagctaccgtatgaat

SEQ ID NO: 77623 - DNA, 323 bp, Oryza sativa
  unsure (1)..(323): unsure at all n locations
atactaagcttctatgccaggtattctttcattngcattgtaccatagttgctcttgcctatatgccattgaacttagttgtccacaattctgtacaatggagaaaccaccaaattcaaaagtagataaatatatgtaggccggaaattacagacatcagatttaattattacctcagcaactttcgccatattttcatgtgcagatctctccgttgaagatgatggcctgttcaatgtggatgcttgctcagaatgataatgcacacttgattctgagcccttctcgcttgatctaacttgtcgattatccaggtaatgatg

SEQ ID NO: 77624 - DNA, 440 bp, Oryza sativa
  unsure (1)..(440): unsure at all n locations
ttcttgtcttctccactcagaatcttcagaaaaagatactagtagactgattcactttattgacaaaatatnggttctgaaaaaaaaaattatgtgacaggtgatcagagatcatggatgtatcagtatcaggagtcgcagtcattagtttcgtttttaagcctacaggaagaacatgtttaattcctgatcgtgtgtatgtgaattgtgaaacggtgacgtaattagccaaatagccaggcatgttttggatgatgaggatcgattntgtgaattgagtttggtcaggtactcttcctcctctctgtctactgcacaacaactccaatgaaattatcatgatgcaacagcaacccagattaacagaccaactagaaaactgaaaataacttgatacataattngcagtgatgaaatcaagttgggttccatttcacact

SEQ ID NO: 77625 - DNA, 404 bp, Oryza sativa
  unsure (1)..(404): unsure at all n locations
ttggacatcacaacttcagacatgtcgtgcctttcatancttgtttcggacatctaggctgcagctagagattatcctttcagattaagtttctcgtatgcgtaatcgcataaccggagatcgagtggcttgtcatacaccccatttgcctgaccaatcgtgttcccgacataatcacgctcgcatctgtntggctctgtggacagtggaggcaacctctaacaaccagagcatacagggtatgatgttattctatgaatacatataatgcattgtacgaataacataaataactctgggaggctagaatgagtgtagaagagcaaatgtactgtaaatttgtactgacttacataatactgcatatattagggtcatacctatatgataccatttactttgca

SEQ ID NO: 77626 - DNA, 70 bp, Oryza sativa
gtgagcgaaccctgcggcgatgtattacttgtatatgttggcatcatgtttatcatgactggacttcttg

SEQ ID NO: 77627 - DNA, 462 bp, Oryza sativa
  unsure (1)..(462): unsure at all n locations
agctntgctgtgatagtagagtcgccaaccacctcaatctagtcaaagctaaatcaagatgggttttgataactaaaccggcttgcagagccaattctaaatagaacgatagataactacccatctcgtgggaaaaacggaaggttttcaggacaaacttaaaaagaggtgtcgcactttcgcaagcggcggcggacgatttacagcgcatatcgacaaagatggacaaactaagcaaaaaactaaaagcaatatgaaaaacgattcgattgattgtttgtagaatgaaccggccatgtcccttatataggggttggtcttgccctctacaggccctcctncacgtccaactagggatagaatccaaaggatacccgatacatgccttcccgagtaatgaaacctcgagacccgatgaaacagtcccagactcagactctgccggtcagaccggncacacac

SEQ ID NO: 77628 - DNA, 358 bp, Oryza sativa
  unsure (1)..(358): unsure at all n locations
tgtgttcttatctganactagacatgatgaaccaatgattagtatgttgaggtggagactanngttaaggaactggttggctatgatgagtgatgggtcaggaggtggtattgctcttctctgggaagaatgcttgctggtagatctcctgtccatgatccacgcacatgttgatgtcttaatcaatgaatcaggagatgcagttcagtggaggggaacactcatctatggtgtaccatatgcacatgaccgacatttaatgtgggaactgattcttgcaatccaaccttcctcgaatgcaccatggttgatgatgggtgatttcaatgagataatggtagtctttgaacatttttct

SEQ ID NO: 77629 - DNA, 474 bp, Oryza sativa
  unsure (1)..(474): unsure at all n locations
agctttggcttcagtgtcatacattggtgtgcaatcgctcgtggcatggatgggtgaagagtaatagctagatgcggatgcaattggctgactgcatactgcatgtggtagactcccacacgaacggacgagagatagagcagcagcagccacaatagactctntatgtcgatctcaagaccagattaatgtcgtctatgttggaaatatagtcattattcggcatattttaatccaagaaattgaaacaatgatcatggcataagcagacataaccagtagcatactatgcacatcatgaatgtcagaaacaggaacataccagtaacgcgataacatgctagaggcatcatgtagaacatgaacaagaacatagctcacatagtatagcgctaacagcagtagcaggaggagaagttataccccgagatggccttcgctgatgggaggcaaatgctctgtgtgtatcgtcac

SEQ ID NO: 77630 - DNA, 275 bp, Oryza sativa
  unsure (1)..(275): unsure at all n locations
caaccatgctgaggacaatatggaaaaggggatcgaaatgtgggaaggaatagaatatctgcgtgtaaaaggactatctaaatccaaaaaggagaaagttntactggataaattgggtttgaatggacatttaaaggagttctcagcagatgaagcgtntgagcaagcttcaaatatgatatcacagctgaacatttcatggtgtaccattctctatgagccgtcggtagtggaattcaagttangaatatccagctgggaggaaagtcttactg

SEQ ID NO: 77631 - DNA, 342 bp, Oryza sativa
tgcattcaagcttgcttatttgttcctgaacttccgtggtcagaaagtacgtcacaggctgggttttcatttgttgaatattaaatatgttctgaattcagtagtctgttgacgtgcgctgtatttaatttgccttttttttttcattattgcagatttgggttaaaccggaagacccgaaattgctatcttctatattcggaacctgagacagggttaccttaccgtttggggggtaccgaccccccgggttggtggtaccgcgataccgtgcggtaccgcgaaaaccgcacaaatttcgttccaaattttgataaaaatcacggatggaccggtaccgac

SEQ ID NO: 77632 - DNA, 451 bp, Oryza sativa
  unsure (1)..(451): unsure at all n locations
ctggagatgactccgtgacaccatcttggctgtcatgtcttccctttctgcttatnngtgataagtaaaatggccctacattgatctattgaaaattagattggtcctactagtaccagttaattagctatttgggtgattgattaacatatagaccctattagcaaataattctaacctcatttatatagggaaatgggccaccgtaactcattcacataccaattgaatcatatcggtatgtataacatagtttgctagcacacgtaggttaanttgtctattgggaaagctaaaaaggtctgagaaagagatggtaggtgttgttntgtagaaattcctctggaagagatgacattatggcttcatctaacaacaacgtcgttaaagtcggtgactactgactaacatcatgagcanggagaannnataattaattaatcaagttctc

SEQ ID NO: 77633 - DNA, 466 bp, Oryza sativa
  unsure (1)..(466): unsure at all n locations
agcttatcctgaagagtccgagtntaatgaggaagcggcatgacaagttatctattagttaggaatagnttgctagtttccttttatctttaagaaagtgtgtttagtgtccgataaggactttatgttttccttttatctttatgatagtttctttcttgtccgacaaggacttatatctacccattgggtttaaatatgtacacccggtgtcaatgtaatctatcaatctcgatcaatacaactactctcggcgcatcgccaccctcttccctgaagttnttacttatcttccggcggaatttgggcacctgacgcggngctgcatcggtttatttcgatttccagcgaatgggtaagttctacgttccgtcgggccctggtgaatctatcagctacgttggtgtagtcaaggctgcatcgctttgatctctttgatcgctctgggttggttatatattggcta

SEQ ID NO: 77634 - DNA, 328 bp, Oryza sativa
cgcttgaatgtcatcgtgctgttgctgcatcatgttcttgaagttggcgtactgagcatcatcagattattgccattcttgcgtttgtgctatgtgttacgagaggttgtattggatctcccacatctgcacatcaagggtgtgcattctcctagtgatttcacccatagtccaacgagaggaacatgatcgccattcacttggagatggatgcataccacttgatctgtactggtgattgtcccaccattggatgtcatgatgcgcacgcccctggtcctcactatcacttgcccatgttgagactccgaagctgtgagatggagct

SEQ ID NO: 77635 - DNA, 441 bp, Oryza sativa
  unsure (1)..(441): unsure at all n locations
agctggggttctacatttatttagatcttagatntgcaactttcatatatgtttgtctccatccgatatcgttaagagattttaaatatttacttatgccaatagatctcagaccttgtaactcattttcagatttttaaactaccttatatcgaatagtcataaactacagagtggaaaatgcttggtatgtaccggttttaagcaaaccggtacttataagatcgatctctatgcgttgttttagtaatgcatcctatcaaaatttcagtgtaaaatgacttgtatagaaacaaataaaatatgataatatcgttcgatagcaaagtgaaccatnttgaanatatgttatgagtaaaatgggccgagaaatattgtagaggtatagtactctgaatggtttgcggagtaaacgatttttttctttgaatttacgtgcca

SEQ ID NO: 77636 - DNA, 397 bp, Oryza sativa
  unsure (1)..(397): unsure at all n locations
ctcgccgttcactgagagctgttcaatttcattccaatggngctccgtatctactgactgcagaggtagaatttgtctctctgaattgatgatttatttatattagttntctaattttctccgtgtctccctgtcctaatgttgatgtttaatctcaccccaatgttcacttgcaagttaacaatcttgattctgctgattcagaactgacccatgcaacatcttctggctattcaaactcgccttctgctgtattntttgaatcatgaactccgcatgttgtccatactctgagtctangttttcatcaccgtgcttgatctggcctgcatatgtcagagatgatggaagcatatgtctgcttcgcaatgactgggtaagtggtcatccgatgtgc

SEQ ID NO: 77637 - DNA, 397 bp, Oryza sativa
  unsure (1)..(397): unsure at all n locations
agcttcggtattacattttatccaccatacagntcgcccaaaatcttaaaagttgctgacatataaggatgacccatacttcaataaaatgtgtaaaattacccatatataaagaaaaaaaagaaacggtaggaatgtactattttcccaagtggataattataagaatgaacataaatactgcacataaaagccacatatgggttgtacctcattcagtgaatgcaccagtgcatcctcgccaagagatgcatagatagttacaactgttagattttgtcgaaagcatccctgacaaaataaaacaattatttgcatacaggttcataggttctcacaaatgtatacagaaagccacactatntattattatcacctgagcagcaatgatccactc

SEQ ID NO: 77638 - DNA, 362 bp, Oryza sativa
  unsure (1)..(362): unsure at all n locations
ttggaactttgctgacctgattccaatgcctacaataatcataaaagctgggatgtaatttggcgcattgtcatacggattngatgatcctatgttcaaggaatttgccttcaccttataattgagacttagttgtcaaagttggttcatgtcatgaaacacactagaccattattatgctaataaaacataagtacctgacggcagatcttgcacatatggcacagatattcttgaatgcgtcaggaattagtggtcactctgattgaataaatggctaaaatagtccatacactgcggcatacaatcaagattgaaattatatgacaatgagacataattgcatttttttatatccgtct

SEQ ID NO: 77639 - DNA, 420 bp, Oryza sativa
  unsure (1)..(420): unsure at all n locations
tttgctgtttatctcgatagatcaaattgttagcgacgatgatttgatctagtcaagggacgtactctggtcgggtcagatctcccagggccaaagtcgtttaagtatcctcgtcgaaaaaaatcctcggcgacgaagcttatgatgacgaggatcccgatccatcggagaacgcacttcnggttgggtcggatccccctatagccaaattgtttgttgtcggacaatccgtcttcttgaacccatctcgtcgaaaccttgaagcatcataatcccctactatgcgcaccattgtcgatgttttagatcacgactatggtgtttgcatagtatggagatcattggtaccagggtatatgcgagaatgagatataagagacgaagacaagggattttatacaggttcggaccccttcacca

SEQ ID NO: 77640 - DNA, 339 bp, Oryza sativa
ttatcaaccattctggagccaggtaggataccctgtgtacctgtctatccgcatcctgagatgtctatgtaccgtggtggggagtttggatacacaatacttgtagctacaaaggataagttgacacttacgtacatcggcaaccatgatgggcaagtccatgatatggtggagatattctctgggcaagtatctaataacaatggtgttcctgaggtgatcgatgatacaaagcgttacacaggggtcagcaacaaactgataatccctctgttctccttggaaattgtatgcagcgtgatgtttgcactggttctgggttctctcttggatttctga

SEQ ID NO: 77641 - DNA, 375 bp, Oryza sativa
  unsure (1)..(375): unsure at all n locations
ttctntgctttgatgcgtctcatgtgttgggacgaggctcatgtgttgggcagtcgcggagtgcgggtaaagtgtacatccactgcagtgtgagtaaaccaaatctattcgaatagccgtgctcgcggttattgagcaccgggacatgtattacactnggctagactctaatatcttaacttgtggggggatgggatattgcatgatgaatnttatgctgatggagccacatcccgagaggagggaaggtggacatcctcagaaaaccatgacgattcaatggcgggaagctatccttgggatcacaatggatggtggacagaaccgtcgttgtttaaagtgaacacttggactaanatttgatcagtctatact

SEQ ID NO: 77642 - DNA, 357 bp, Oryza sativa
  unsure (1)..(357): unsure at all n locations
atgcgtctcatgtgtngngacgaggctcatgtgttgttcagtcgcggagtgcgggtaaagtgtacatgcactgcagtgtgagttaaccaaatctattcgaatagccgtgctcgcggttattgatcaccgggacatgtattacacttggctagactctaaattcttaacttgtggggggatgggatattgcatgatgaattttatgctgatggagccacatcccgagaggagggaatgtggacatcctcagaaaaccatgacgattcaatggcgggaagctatccttggatcacaatggatggtggacagaaccgtcgttgttaaagtgacactggtactaaattgatcagctatact

SEQ ID NO: 77643 - DNA, 470 bp, Oryza sativa
  unsure (1)..(470): unsure at all n locations
atcttgcgtttatatttattanaagaancatttgcttaagaaataaaaacagaccatcatctggttgataacttatatcgnggtaagacaatagaaatagagaggattacgaaatcgtgccaaaaaaaaatcttgaacaagggcttttcaagaatatgtccaatgtatatgccagatatataaatattttgaaaattcaagagatgatatatctttacccttaacaagtcattgattctacaaattaacatcaatgaacccgagttccataattaaaacactatcatacaatcagttgtcttccatttntacctttaccgttagtcttccatcagatggaactccgttaaccccattgccaaagataataaatagtataccctgtcaaaaattctaaaaagatccatcatttaacttataactttgatacctcttgtcacaccaatataatataaatatattggtgacac

SEQ ID NO: 77644 - DNA, 375 bp, Oryza sativa
  unsure (1)..(375): unsure at all n locations
tgacatgtgccatgatatgttaaggagtgttatcagtgttntattttgtggcatcattaatgaaaagatgatttggggttatttcttatatccaaagcatagcataccacttatttcttattagcgtgatgctacttctgtttttgacactgtttagccttttatggtagtttccataattggaaaactctaaaaagtaaagtacttactgactacaattggtacaataattgagttttccagtgtggtaaactattcttaatttcttttctcatgccttatgtttattgaagtcagatctaagaatagagtaattattggggaattgaaaattgatggttttatttcagattttctgatataggttgaaattat

SEQ ID NO: 77645 - DNA, 416 bp, Oryza sativa
atctttggttaccttcagttcctaacaacaatcaccattactgataacaatcttcatggtggtggtgccaaggagatcttcaggattccaacaatagcggaagttgggtttgcattaaacaatctcagtggagaacttcctacagaaatatggaatgccaagcagctcatatatttgcagctttcatccaataatctgtcaggagatatacctaatactttgagtaactgtgaaaatttgcaacatgttgagcttgaccaaaataattttagtggaggtattcccacctcgttcggcaaattaattagcctataatttctcaacctgtcacacaataagttaagtggatcaataccagtgtcacttggtgaccttcaactccttgaacagatagaattgtcattcaaccatcttac

SEQ ID NO: 77646 - DNA, 271 bp, Oryza sativa
  unsure (1)..(271): unsure at all n locations
taagctttaaagtanaactataacagcaaacttttatgtatattactaatacaaatgactgagaatgcacttctctaatatgaacaacaatatataaacaagttaaaaataggtgatgatcttataacaatattcgatcttatggcagattacagggacaaatatcatagctggcagatataagactggtgcaacactgtatacaatccattgagaaaatggtggaaatcaacaacttcttaataagattttaaatcacaatatttgtctt

SEQ ID NO: 77647 - DNA, 464 bp, Oryza sativa
  unsure (1)..(464): unsure at all n locations
tctagcttgacttccacaaggcatttgatacggtcaggtgggacgctctgtttaatgttcttggggtaagagggtttccggataaatggatttgttggatgaaatctctactctgcacaggaaaagctcatgttaattatcatcaacagagaaaagggagaacaaattctatacagaatgggagtcttgtcaagtgaccctttatcaccatacctattcataccagttgcagacgttctacaaaaaatgatccaacgggcatacagcacagtcgtcttaattcacccnctagatattgaatgtgaatcaccaacacagcaatacgcagacgataccttgattctcataaaaggagatgcggatcaagcaacaacactcanagaaattctggattcgtttgcaagcttttcaagcctacagatcaactaccataagagcactcttngtccaatacacctgaatga

SEQ ID NO: 77648 - DNA, 419 bp, Oryza sativa
ctttcagtcctcgcagactaagtagataaaatcaaacaaggtaatgatagaccaagttagcaaattaaattgataaaaaatcacactccattattatgatgatagcccccgactgacaacggcaagaagataacttgatgttgacagtcaagatatggaagtgcaatgatatacttatgcgttgaaacgacgaatatgttcaatgttccaagagttgtcgacaagaataccgtctttccgccttgagtctataagaacctggccgggtgacttcaaagataataaatgtcccttcccatataggagataacatgtgccgatctcgtgtagtttgaaatttcctcaaaaccaggtcaccgactaatatgcacgataccgaacattgcgattatgatagcgccgctacccttgtatatatc

SEQ ID NO: 77649 - DNA, 463 bp, Oryza sativa
  unsure (1)..(463): unsure at all n locations
agcttaagctaaaggtccataacaagtcaaatgaatgtggaatcaatggtgccacgtgagaatgtgaccaatgaggtatatacaactaagcacgcaaatatcaattagtaaatttatttggcaatactgtgatttgtttgattttttattcaagcttatgtttctgaacaagatggtactgatattatgaatgggtttgttcacaaccgtgaggaaccacatgccaatgagaatgctataccaaataatgtgcaggttctggaatgtctactttaaaaatgttgaatcaaagtttgccaatgtcttaattctatcatttattattacagcaattatgttctgttagttcaactagagctaaagagaattgttctactaaagctttgccatctgaccacataactgcaaaggtgtgttacagaaatcttactctattactganacatgtgaatgttacaacatt

SEQ ID NO: 77650 - DNA, 514 bp, Oryza sativa
  unsure (1)..(514): unsure at all n locations
atctcatacttagtatcttgaactgactttgtcatcatatatcacttgttatgaaaatagatgcacaacggagacatgaattntacgtggaaaatccttgcgggaaaaaaccacgagcgtcgaccggcaatgattactatataggagttgattacaaacgtatgggaataacaatgggaatgtcacccctttccgtatggcttacaagagtatatataggagataatagggagacacctaatatgaaaagatatggacttctactatgaaactaatccgaatatattgtgggctcataatttgtatcacatatttaacaattatctctattttttataatatttaacaggtacttcttccgtattttaatgtatgacgcacgtgattnttcgactaacatntgaccattcgttgtattcaaaaattttgtgcaaatattaaaatatttatatcatgcttaaataacattttgatgataatcaagtcacattanaataaatgataattacataaa

SEQ ID NO: 77651 - DNA, 447 bp, Oryza sativa
  unsure (1)..(447): unsure at all n locations
agctngctctacgaaattggtaacattgatgcaagtgagacaaaagtcacgtcatgaaacaaaattgcaagacaacttacagggtttgtcaagttgtgttggatactccctcgaatgctnttagagatgtacttgataagtagattgaaagaaacaaagtcaggcttgatttgtgatctgcacccgaaaggttntgcaggtacctttttgtgaatattttcaatccaagttgactcctctatatactagtccatgaaatataaatatttagaccattcacgcataattntctgccttagatgttacaagcagtagttagagcatctctaactattntgtgatcgatgcataaaccgacgtggtatgctcatagtgactcatcatcactgaagaagccaacttgtatcgaggagagaatataattgattcacatttaagagtcgactc

SEQ ID NO: 77652 - DNA, 463 bp, Oryza sativa
  unsure (1)..(463): unsure at all n locations
taatagtgatacaggacaaaccatctgctgatctgccagatngcatactgcatccttntattctgtcatatatagatatcaattaacccacttgtgtgagtcatcgcaatttgattgattgaaaattacaatcactctgcatagtagattgatgtctaacacagaatatataagtcattaattgccacaaattgcactgagagtttgtaacttaattgcaagggttgatataatctttgcattagtgtttatatcttcatgtgatatacagcagttcttcaacttgcacatgttcactgaatccgctatcgagatcaactatctgaactgaagaccctatatatcatcaccatatatatcaacgagttttgtaggttcaattcacttcacatatgaaatatgtaactaaatggttaggctagataatgtacaagcacctcatgtatgcatgctgactattctt

SEQ ID NO: 77653 - DNA, 479 bp, Oryza sativa
  unsure (1)..(479): unsure at all n locations
ctaagcttctgcgcactgatctgattgacatcctatctgagatatgcacactctcacgactgctaagcgctatgtatgagactcatgtgagaaatggagacgactcgagtcttccccccacccacccaacagacccaactgattggattgatcacctatggctccatggctgtggccatgtctgacccggccttctcgtacgctctgaagtcaaccatatgatgttttctgcatattcacccgcatatgatatgagacaaagagacagcactgccactgatatgtactcccnntcgtcanaaataaaatcaaactaaacaacgatggtaagtacaacgaatataaatagcatgtccatattcgttgtactatatagtgtcctattgtngtctaggttgagtttgttttggacggagggagtangagtatacatntatttcttctgtgccatcatctacagtatagaaataagtactata

SEQ ID NO: 77654 - DNA, 418 bp, Oryza sativa
  unsure (1)..(418): unsure at all n locations
agcttcttgttttactttggtgtcacttaagttcaaatggctggccaacctgctctcaagggtgataaactcgtcgctgtatgaggtttgcttctcgcggtggtcgttgacgaaccggacctctgagccatggcttatcggcaactaaatgatatagccaatgtagtcaattaatagagatttacatgcagctaanaagtctttcaaatataaatacatgtntccttttgagtaagtggaaatacatgtattgtaatgtgcagctatgaaactatatacccaacactgcaggtacataaaagagcaataattaatatggttcgaccattataaaacatattaaattattgaatagcctacttcacatgattaaaaacaggggtgatgtagaanacttcaattaattntacttcttttt

SEQ ID NO: 77655 - DNA, 326 bp, Oryza sativa
  unsure (1)..(326): unsure at all n locations
ctaagctttctgggcttatgcctcatttcgccttgttccgccgcatcttctttctcaagccccatctaaattagagcaaaccatgcgtcgttgggggtgctggtttccaactcangggaacactaatccaaaaatacttctccatgcccttcaagacctcaaataaatgctggcacgcaaattggttttatgttcaaaaccccgagcctgttctttccgagtactcctgccttcctccagtttatcgggataactggaactcactgccaatgggagatgaagctgcacaagcagtagaactgatggagagaatgataaagctgaaa

SEQ ID NO: 77656 - DNA, 515 bp, Oryza sativa
  unsure (1)..(515): unsure at all n locations
cagctcggacccgngatcctctaagtcacctgctgcatgaagcttcgtttcaacggcgtcagcaccggccccattcatggagtccctacttgaacaatgctggtgtggaactaagttggcgaaatcatcttcccggtttacaccacggtgccaatctcggctggtccatcaattatcggaaacgagaacgccgtggctataaccccggacgatcccgcgtctatggatcctcccgccgtatcagagaatggaacatcgacgtcatacgagcccgagaaggttcctagtgtggccgaaccttgtccttccgacaagaactccgagccgacaaggacaacttctgaggtaaaaaagtcctggtatcctatccacaagtccaggaagcacaacttgcaagctggctgtgtttttctcaacgtacaagctaatattcgtgcttgaaagagcgtggaatcagcgtacttctcaactcatgatgtctattgtctattcacaaacnaagaatcacgactctc

SEQ ID NO: 77657 - DNA, 178 bp, Oryza sativa
acatacctttacacgtgcccctgctgggtccacctacgatacactctcacgttaacttactcgttcaagtacatggttggatcctcgttccctcttcttattccaatactggctgcttacctacgcgattgtatcgtacaatatctgttcctcatcgcggtcagacatctgttgatac

SEQ ID NO: 77658 - DNA, 441 bp, Oryza sativa
  unsure (1)..(441): unsure at all n locations
agcttggatttttattctgatcaccacgggcttagagggctngggatccagttgacctgaactcaatggtggatttggtggtgacaacaatgatagccttggatggtgtccaccaccgcttccctctatctggcaacattacctatggccaacacaccatggagaaagtgaggactgaccgattggataatgggagggaggccaaagatcgtcgttccaccagcatgcatgtgggcaccgacagatctacaatgaggctagatgcgatccaccacaccattggagggagagtgttcataatctcttatagggtaagttggcttacaagaaacaccaatttcttcattgtacagatacaattccatataaccacacaaatgataagctaatcgcataatngtgttacatgtatccattntgagtggtaggcattcaattcca

SEQ ID NO: 77659 - DNA, 348 bp, Oryza sativa
  unsure (1)..(348): unsure at all n locations
tttcttcgacacatattcaccaattgctcgcttgactacgattcgagtactacttgctctggcagcctctcatggtcttctcgtccatcatatggacgttaagacagctttcctaaatggagagctggaggaggagatctatatggatcaaccaaaccggtatgtactanaaggtcatgaaggaatggtgtgtaactattgaaatcttgtatgcctcagcaacacctaacaatggatgagaagttgacatcacgctacatctgctgctttgtgtgaacaactacaatgtgatactatcctatggtgtggaaagtggatctggctgtattcatgacatactgtcttgga

SEQ ID NO: 77660 - DNA, 293 bp, Oryza sativa
agcttaactattgtgatgaactaactgatcttcatcgaatctcgcgatcaagattgagatcagctctgaagccaaggctgaaaaaagttactagagcaagtagggggaggaggaggcggcaatgcctctcactcgatcggtggtagtcctgaccttgtcaggtgactgcggcggtcggcggagatcttggtggccgtcgcggtcggcgaatcacgcggcggcgaggctcgagatggtggcggtgcgacgagcacgaagtgggtgtggaactgcggatgcgggtccgggagatc

SEQ ID NO: 77661 - DNA, 472 bp, Oryza sativa
  unsure (1)..(472): unsure at all n locations
tgatgatngtgacgacctttggactatctatatatgcatatgagataaaaaataatcagaatggggaggggggatccattctatgccattgattttgtcaatctatagacgcacatgatactggagccacatgtcatcctcacagtgagcagcatattatggatttatcctatatatatggtgctcacaagaattatatagaccagcttgctaatggagaagttctatcttgattcaaagaaagagttgagatacangaaccatcatttttacatagccgttagcatgtttggtgccaattgactcctgatgcagcactaatatgaatcataattgtctcacattatgagaggatgatactacgaaggaaatgctgagattacaactcataatcaaacatatgtacatgatgtgaacataaagtcaccgacttgctgaacatatatttttgtcaaaaataatgtgacagtat

SEQ ID NO: 77662 - DNA, 474 bp, Oryza sativa
  unsure (1)..(474): unsure at all n locations
ttcttatctatgctgttanaacgtggccttaggctcattgagacttttcttatgttgttgggctgctaagtgactctagttggctccctcctcactcccccgctcgttatgcgaccaagcgatggataactgaagcggcagagccatcgtatgcaagcggggggatggcagtaatgagcatgataagggctataaccaacgggcagaacactaggcgagccgtcgagctggctaatgtagcgcctagcgtgcactagcactgttggagatgcatcatgtgctagcaacgaggcaagggtgatggccagcggtatctcgagctagtctagtagtattggaaagatcaagggaaccacccnncatcccgtgctctgagagtttctatggaagtttcgctatgaagggtgagagaaatcatcgagtttcgctctgaatgttcctttatactcaaagcctaccaggtactactccaat

SEQ ID NO: 77663 - DNA, 369 bp, Oryza sativa
  unsure (1)..(369): unsure at all n locations
aatcccttttgtgcatatctggatctggatcctgcttaacatacatataggatgaggagtatctgatgtagatataatactcgagaaaaaatcaagtattgtaaaatatttataaatatgtatttctcctcttggtcaatttgatttccccgagcagatgactctgtacgttttaacactctgtccgactagtcatagcccccaagcatcgggagtcggcctatgcattttccanacatgcatatgagtgacatgagttcgtcattaatggaataaaggtcacggatcagaatttactactcatgtactttgcaatattaagagcagaaataatttatctcatctttgctttgattatccgaatatact

SEQ ID NO: 77664 - DNA, 522 bp, Oryza sativa
  unsure (1)..(522): unsure at all n locations
gcaattcagctcggacccgggatcctcttagtcacctgcggcatgctttcttcttgcatttgtactgaaattcacatgtntatgatttcttggcgttagacaatgttgaagtaattntatattcttattagcctgaattttaagaaattatgtttgaagactaagagtgtcgaacaggaaccattctgacacatggtatgatcatatggatataggtcacttgtgatggacaaacaaacataattacatgatgtctgattgtgattgcagtcagaattataggtaatcacaattttagtacaaccaatgaaaggttagttcaagagtaaccaaatattacagattacttcatnggatgcatttttggattattttgtataagtagcanagagggcaaaccagtagttagtacttactatacctaatagcactttaaaataaataaacatgatttggcaggaatgatacagtagtactctaattactgagtactgagtagcaattgctgtacttatactaaac

SEQ ID NO: 77665 - DNA, 415 bp, Oryza sativa
tctaatatacatattcaaatatgattaattgtaggccatcaatttatacttccttcatcccaaaattttactacataacattggatgagacacatcgtaatactatgaatccggacatatccatattattgggacgtgtcctatcttctagtattagctcctaatagtttgggacgaaggtagtactatatagtgatgccatactactatgatattggtattcatttcgtaagtaagtgaacaaaagataatgtatatgtcacatgatcgaactcatccaacttgttacaaattagatgaaaccactcaccatcatgggagaagccacttacttaatgtactctactgtagatggagtataaactgatgcgggtgcttaagtttgattgagggggatgcatacatgatgaaaata

SEQ ID NO: 77666 - DNA, 421 bp, Oryza sativa
  unsure (1)..(421): unsure at all n locations
atcttgctgtttctcatccactgcgatgtgaccacttgcatctttgtgcatatatgaaatagctgccacaagatgttcctctcgctccagatnattgagatgcaatgctgcagcaatgaattcgatataatcaattgctccgctgttgtctatatctgcctgatgaaacaacagaacaaaagggacactgtaagcttcttgattaccatgttaacctgatgttgaaatgtgtgcagtanacagacaatcatgaggctgaagttatcagcctacaaagaaatttaagaaggcaagatctgcctgctgcatgttttctaatcatagatactgtatagagaacagccaacatacaggaagatgtatgggcaatgacttctctcttaagcgctcaagcttctccatgaagacaagtaatcttgtg

SEQ ID NO: 77667 - DNA, 272 bp, Oryza sativa
cgcgtacggctcttcttgattgatctctcctatcaactgagatagccagacgccttggcatgcatccagtgtcgcagcgatgtactccgcctcgcatgacgaaagcgcgacaaccttttgcttgactgattgccatctgaccgggcttgtcccgaggaataagacaacaccggtcgtactcttgcgcgtgtctgggtcgccggccatgtccgcgtcactgtatcccaccaactgaacggtgctgctggactggtggtagtgacacccgaact

SEQ ID NO: 77668 - DNA, 383 bp, Oryza sativa
agcttcctttattagattaatttgcttacccgaatatagcatgaattcgactattagtgatgtgagaattctcttaagggcttaccaaatttcactgttaacagctgccacccacaccccccccagccaaaaataaaataaaatgaaggttagcaaatccgcataataaaacttaatagatcccatgcacttatattctatagttcatactcaaagcatggcaatgtgcatatcacatatatacatttcactcaacaatgttgcatgctccttgcgtacatgcacaagacaatccaatggacaatacacacgtgaaccgaacctcctagctgatgggtagctctttatcctcaccattccatggtgtctgaaccaccatgtct

SEQ ID NO: 77669 - DNA, 426 bp, Oryza sativa
  unsure (1)..(426): unsure at all n locations
gatgctagctttcgggatataaaacgtagtatttaaggttgccgttgagagcaaagttggattggtgcaatgccattctaatgaaactgcatttctcttccatttacgaagtagaagtagaaaatctgttgatcaaatgaagtagctagtaatggaccatgggntgatggatacatggagtgtgagccgatccacttgcgtcctttgatcatggagcgtgagcctgcacggacggccaatatggccattcttctttttttgaacgacttgaatgcgaagttctattgatagagcaggaataaattacaagattacaaccctgaagtgcgtaaccagaatatagattaaaaccccaccccacaccgcatcgtcacacattacccagagatgcttcaccagacgtgtgtcgtatcgtgccgaccgcac

SEQ ID NO: 77670 - DNA, 399 bp, Oryza sativa
agctttttcttttcctgttaatatctgggtataccaatgcatttcaagaagctaagtaataatgattggaaggttattgaacaaagaatagagagaaaacttagtccttggaaaggaaaacatatgtctgttggagatagataggttttgaatcattccgtcctttctagtttagctatgttcatgatatctttctttgagactccgaaaggggttcttcacaagattgattattatagatctcgcttcttctggcgaggggatgatcataaaaagacatacagattaactagatgagatataatttgtcaacccaaagatcaaggtggttggggtgttcataatttagagactcaaaatatatgcctgttaagtaagtggttatataaactaattaat

SEQ ID NO: 77671 - DNA, 417 bp, Oryza sativa
  unsure (1)..(417): unsure at all n locations
agctttctgtttatctgtatctccatgagcttcttgccttcagtggccgaacaatccaaaacatattcagaaaacttgttaaattaaactctccacgagattagtagccaaaaattccgaacactaaatattagtatcattgcataggaagaagaatcatgaaaggagcagagagatcactgaccatgcaattcttctacatggagatgaagcctcagatgagctgtagtaatcctgtggcttctgtcaacagcancagcacaccatgtgccatgtgaggcaaaggtgagtatgaggaggaagagagcaataaagcttttcatcatcttgagatggactaatcaccagctagacagaattatgttggaacgtgtgtggaagctttctctctataacaccagtaccgtagctactact

SEQ ID NO: 77672 - DNA, 144 bp, Oryza sativa
ataccctccaactgtcacagggaaacaatccacaccgtacatcaacaaccataggatccagcgggtgcatggtgggatctggccgaaccacgggaaggtccaatctaacccatactaagctaacgagcctcctctctgctgcac

SEQ ID NO: 77673 - DNA, 228 bp, Oryza sativa
  unsure (1)..(228): unsure at all n locations
acacaagaccggaccctncttgatcaggacactatctgctttatttgcatttacacggaccgaggtggttctggacctatgaccccatacccctgcgactgaagtaatgagtttggatagccatatgagatgacgtacttacgcggatatgagaaggagcaattatattatattttcgaaaaaacacgtacggacatacgtgaaacgccccatatattgccgccttgg

SEQ ID NO: 77674 - DNA, 414 bp, Oryza sativa
  unsure (1)..(414): unsure at all n locations
agcttgatacattctatctctctagcatttaacacaaagaacctgatgaagttcaaatctaacatatttccctgatagtttataaattccaccatcttgagatgtagatcaaagcactcaagtgaaacaattcgccgtatattctttaagttcccctgattgaatgcctgacaagaaaacaattgagttgaaagaaacacgatatcagcatagatccaagaagaggactgatgccgtatcccatagcataatagaaaaaaaagagagtgtttattcactgaatttaacaaagaanaaacactcaccacaatgtatagcttttctacgcatggaaagcattttatgaagtcaataacaacatccagatcacgagtggtgtcaaaggctaaaatcctcacactgcgcatcacattg

SEQ ID NO: 77675 - DNA, 415 bp, Oryza sativa
atcgactcggcccgagatctctaagcgactgcagcagctttttgggctcactaaagaaagcgagagcttggaaaaacacacgcagagccccctacctggcgcgccagatgacggaacgtagggctcctcaccgggagaccgcgcaagcccccctttgccggttcggccgggggccctgagtgaggttctaagctctcggtctgtggaaagttcgcgagaatggaaacacacaagacacaggcgatgtatacaaattcgggccgctgagaagcgtaataccctactcctgtgttttggaggatctgtgtatgaagaaactacaaatagctggagagccagagaactctaactctctccctttctggtccgaatcccagactcggatcgatctccacccttcttcctctctctctaa

SEQ ID NO: 77676 - DNA, 365 bp, Oryza sativa
  unsure (1)..(365): unsure at all n locations
agcctattaaggtggggtgaatggtatggaaaaccaaatacctaataacttttagcggaaattaaagttaccctcaaatcgatggaaatctcgacgtagtcctgtcgccggcgcgggttgaaccgttttgacgccgccggtcgaaccgcttgcacgccgccggtcgaaccggcgaatccgatgaaacacanatcaaagaactcttaaagtagatgacaanctntattaccttctctgtatttacaaagtgcacgaacagcactccttacaaaaatctcgactaaactcgaacccttacttaactatcaactcatttgtcttaaaagcgataccgggatgcctcacgcttcccctctatttataca

SEQ ID NO: 77677 - DNA, 352 bp, Oryza sativa
tagcttctatggttcttggtctctgcccgaagcattgaggccaaccctgagaagataccggctatagagcggatgcgcccccccagcaaacttaaggatgtgcaatgcgtcaccggttgcatggccgccctaagtcggttcatatcgaggctgggagagaaagcgttacccttatttaagcttctcaaacgctccggactgtttacctggacggaggaagccgaaaatgccctcacccagttgaaggcgtatctaagctctcccccagttctggtcgccccggagccagacgagcccttgttactctacttaacggcgaccccgcaagtagttagtgcggcatttgttgtgg

SEQ ID NO: 77678 - DNA, 390 bp, Oryza sativa
  unsure (1)..(390): unsure at all n locations
atcacgaacagcggcggcgacggtagccgctcgcgtgtactgagcctcggcgacgacagcggcgatggcggcaacggccgcggctgcggtggcggcacgaggaaaaagctccagctcaccaaggagcagtcgaccttgctcgaggacagctttcgcgttcacaacattctntctcatgtacgtttacgtgcacatcatatcgagaatctgtactaattctttgggattttaacacaactgttcgatcgattcatgcatatgatccatgtagttagtaagaaattaactgatgatttcttggtcaactgagatcaagagatcgagcccgtatgagttctgcttcttctanggctacctgatgaacgtatctcatgggtggttcatatatga

SEQ ID NO: 77679 - DNA, 377 bp, Oryza sativa
agcttgtgttctctattctagtttatacctggcattgcaaccaacattcattccaagctgggattcgatcattcatttcttgggccgtacaaaaggcagtcgcctgcctaccccttcttcgcatgtggtcttgtaaatcaagagatagatcgttagctaatccctgcttaaaataattctgcatgtacctaaggaacgtgtcctccacaagctatttttttaaagagaatttaatccttcacgtctggttattaccttgttaattcatccggccatcttatttaaagtgtagttatggtttttcatgttcaacgtttgacccgcttatattatttacaattgttctgtgattagcatttttctctattagataataa

SEQ ID NO: 77680 - DNA, 432 bp, Oryza sativa
  unsure (1)..(432): unsure at all n locations
gctaatgcagcaagtattaattaagcttcctctccacactgtacatgttaataacgagaatctttgntgctactctacttttgctactgctaagctactatactgtatactctctgatctctagatctctcctcttcagcagctgaatcttaagagaggttcagtgtgactcacatgcgcacacacacatacacaaacacggttgcaagggcacacacccggcaaggccggccggctacccttcaaatattctctcttgtggtgttgtgggtcactggctcactgcctgnacactgaacacatgcacacaccctctctaccactgacttcctccatcattatgcatggataactgcgcaagtgagtagcagcagctatactagctaagctatgtatcctggatttgtccacatgtacgcttgaacacgtaca

SEQ ID NO: 77681 - DNA, 353 bp, Oryza sativa
tgtttattatatggtcactgcactgtcatatgcaaatgagagtttgtacgatatttgtatcgaaagcaatgaccggatcatacttgtctgtgaaaagcattcatcatatcacggaaaaatgggcttgttgtcttgtgtagacatttaattaacctctcaaagttccctaacttcttaagcgcaaccttaatagcacagctagctgataactagtacgtgctctcgccgggtctataatttttaacgttttgaatactatataacttttaaaatatatctgtaactacagcttttctattaatatatacaaccaataaacatatttttactttttaagacaaacttatatatat

SEQ ID NO: 77682 - DNA, 479 bp, Oryza sativa
  unsure (1)..(479): unsure at all n locations
ctgctggttgacactgatttgtcaactgatgctggtgtataacattattagattctactagcatggagaacaactgaagaaaaaaaagagaagtattattgctctctctatctctcgaaaaaagttgagtgtgactttcaactaattttaatgcacacgcacacacatacatacggacatccatatccaaataatgttggtagtccctttcttgcatctcccaaaagccttgctcttttcgtccaaatgcacacaagaccccactcattttcaccatccaccatgcatcaccaagatgaagatcctgacattcctctgtaactttgcatgcaattgatttcctttcacaatgctcttgaaaatttctttcctaccatgcttcgtattattaactgattctctctgaaactactcatcatagtagtaacttgaattgtagcattnggcattcttcgatgagtcttgatcatgttcttctt

SEQ ID NO: 77683 - DNA, 451 bp, Oryza sativa
ttcagctggtcccgggatctctaagtcacctgcggcatcaatcttttatccgaagcaacccgctgtccctttcccctcccgaagtcaccccccacacacttgggcgctggacacgagacgtaactgtgctccgcgaccgccgctgctgcggatagcgtgggagggagagagcaagggaggaggggggcccgtggccgatgaggagaggggaagacgaggaagagcgtgcgccgttgcgtgcgtaaaagagcatgtataataacaggctatagcatgtacaatagctgggctattagctagctactaaatgtaattcattctagcattcttcacatttatattaatattaataaatctagacatatatatctatctagaattattaacatcaatataaatatgggaaatactggatgacttacattgtaaaacggagggagtatcaacatat

SEQ ID NO: 77684 - DNA, 403 bp, Oryza sativa
atcttctctttcttgcttaccaggaacctggtttggcttcaaccaaccccgccccggcgttcccaactattggcatgcgaagtttccctgaaccgactagttacttagccatggtgtctcattccaccttgtgggtgcactttgattatgctcgatgagtttcccataagaatcggtcctaatatgtgaatacgggacagttccacataagcacaacccccgcatcgcgagttttcacaattcattttatttttaaacacatctacaccacatgttgtgtttcaaggctgtacaaacccattttccaagttttcgacaaacaaccgtgtatgtgggatatctggatacgcgctcagagagcacggataccgatgtaccacaaaagtggagtgacaggagtcac

SEQ ID NO: 77685 - DNA, 423 bp, Oryza sativa
  unsure (1)..(423): unsure at all n locations
ttcaaactcagccgcacgtgcttgacttatcttttctcaatcttggatgtggtccctacattgatgtngcgaatacatggggtgcatcataacttgattttttatcccttcatttcaattgccataaataataaccggatgtaaacgcttaatcatataaagcttattanggagtcgtttgggcactaaattggctgcagcttaggctagctgctcaaaggaggatgtagtgcatacgtaggggcnaggggtcaggccctacgataagataaattgttgattagataactggtcctcctccattattaagatggttgatatcatctaataacatgaataggtatcttccaactaagtcccttcatcctacaccgcgcccccggtatctccgcgggttaccccttgatctaccctaccaacaaa

SEQ ID NO: 77686 - DNA, 413 bp, Oryza sativa
  unsure (1)..(413): unsure at all n locations
cctctctgagatgaatncagtcaagatattggatgctatggaccatcttcgctctctcgcttgtaggctcatttctatagactataagttgtatccccatttggtagggagaaatggaatctcggatggttgttatccttatcggaagatttcctgtggagtactattggaaccccatggctttattttctgaattcctatgtaatggaccattccaaatggattatggtggaaatttcagtgatgatatacatcatatgacacaccatgcttcttgcaacctaagtttccttcttgcgcatcaattccaaacactttctttgtacagcttcatcgcttctttcatattagcatactccctccggttctttttgttatgacgttggctagattactgcattcatcctgttcct

SEQ ID NO: 77687 - DNA, 399 bp, Oryza sativa
agcttctaatgtctattctcttcccttgagtccggaggagttcaacaagattgatggactagtggaggccaaagagatatgggataccttgcaattggctcatgaaggatcacccgccgttcgtgaggccaagattgaattattggaagaaaagcttggaagatttgtgatggatgacaaggagacaccacaagagatatatgatatgatgatgattcttgtcaacaagattaaaggacttgggagtgaggacatgacaaatcactttgtggtcaagaaacttctccgtgcatttggtccaagaaatcccactcttgtatcaatgatactggaaaagaaagacttcaagagactcaccccaagtgacattcttggaagaattgtgtctcatgagatgca

SEQ ID NO: 77688 - DNA, 364 bp, Oryza sativa
agcttttatatctttttaatggtttgatggattgttgtcactgacatcatcaccagcacgcttacttcatcggccctgacatcttcgccggtgctaaagggtgactacctcctcgccgtcagttacttttgtcatcaccgactttcatcgccgacttgttatatcgtcttcacggttggcctactatgcaactgccgatagaggatctcatcgttatcatggactagctacattactattgactggatcaacgacatggttatcttcatcaacatcctgtcaagactcttcaacatagcctactctgcttgcgtgatgggcaacttctcatcatagccgagtatctctgttgccgtaatcatca

SEQ ID NO: 77689 - DNA, 449 bp, Oryza sativa
  unsure (1)..(449): unsure at all n locations
tgctgcggctcaacctccactggtgccacatgctttgactggccatcatcagcanggtcatccagcctcctccgccggcgagggcgaccaacctgtactgcangcttggaccgccgtaagggactgcgggcgccatggaggggccgtgctgtccctgtgaccaatggacgatgacagttgcggctgtcgtgagtccacgccgactgcgatgcgggttatgcgatgacatgttcaaccctgcgtaaggatagccagatcggcaaggatcagtttcatggtatatttttcttgcagctcctccctgtcagcatcttcttcctctaatctattctagattttcagtgttccaacatgattgatttacagccaaatataatccattccttccgtgcactcctatttataagcttgactttcttcaaccgatgtcatgtgtagccacattctgt

SEQ ID NO: 77690 - DNA, 346 bp, Oryza sativa
ccgacccggaccctaagcaccgcagcatgcaaccttgtgtttttaggacactccataatgcgtggctcactgccgcttccatcggaaactgtcgtccagctcataatgatggcaaccgaaccttgtcgcgccggccgcgaccaattcatggtacagctatcattaattacgcatcatccgctatatcacttataggcgtatcaccagccgtaagggaccaatactgctaaaaaatacccccgcctgccatcatgcagatgcgaattataacatctgcccctgaagcacacaacgagataactgatcgcacggatcaccctgcgctgccataaatgcccgggaaacg

SEQ ID NO: 77691 - DNA, 347 bp, Oryza sativa
tgcttgttcttctatcaacaatttttcgccgatctgttcaacggcctggagcttaacccgcaactactggggcgcgtctggtttgccagccagcctgcctcgttgccggagggcaatttatgtattgaatttccccgtctggatatcgagctgcgcggcgaatacagcaatctgctggaagcaaagcagcaactgttggtggaaggagaaatgctgtttattccggcgcgcgcggctaatttaccggtcaacaacaaaccggtgatgctgttaaacctggtgttcgcttcgacctgcgtagagttatcagtttacgatagccgcaccaccgtcgtgttgcatcctgc

SEQ ID NO: 77692 - DNA, 336 bp, Oryza sativa
  unsure (1)..(336): unsure at all n locations
agcttgtggttcatgtgcctagagagcatgcgtctgacgaaactcatttgcatatgtgcgacatatgttgcttaaagttcataaatggtggggttgagatagtgtccaaatcgcgaatgctgacgcgggtaaccatatctcaaaaccatgccgaggctctgaatagttcaacaaagtttaattcggcttaattcaattagccgagttnttgagtgctgctatggcacacatagtgttgggaattcccgcccattttggcgataattgactaaccaaagctatgcaccatgaacattcttaaatgcgggtggactgaagaatatacttacatctatc

SEQ ID NO: 77693 - DNA, 479 bp, Oryza sativa
  unsure (1)..(479): unsure at all n locations
cttctattgatgaatgttgatactactatcaattcatattagagcgtaatagattagctatcaagttgctttcagctgtttttcttatctctgtctctcacctatgctttaatgtgataatcttacagtatttgtagagtcaatactccttatgttcttttggctctctactccatataattccgcagntagctgatagcccactattgtccttattcttataccgaacaaattgatttaaggtccattataattgtgggattgaaattaagagaggaatattaaacacacctgattctgacaggaatagaagtgtaaaatagagaatctgccaacatagtanatacacatgaacaaccgtttgattgggctataagaaaaatgctaaacttgataagagagatagactctaaggtagaattttcagaaggtggagttctttactaagttccttcaacatctacatgcaatgaatcatt

SEQ ID NO: 77694 - DNA, 382 bp, Oryza sativa
ttgcttttcctacaagtgacagctcatctattgtgtgtcaagacaaaaccaagtgcggaatcccgaatctgcatcaatacactataggctgtgttcgagaaaggggagatagagaagattgggaagatacgcacaacgaggtgagctattagtgcataattaattgagtattaattattgtagattccaaaatgaactaatatgattttttaaagcatctctcctatagaactatttttgcaaaaaacgcaccgtttaatagtttggaaaacatgcacgcggaaaacgatgggcaatctatctacaatctcccccgaacgaacactggctatgtattctacaaagatcattgaacatatatagtctagcaatcttatagacc

SEQ ID NO: 77695 - DNA, 353 bp, Oryza sativa
ctatcttatatataacatcacaactcgaggacagctgaacatgttcgcaatattccacggcatcagaacatacatcccaacgccatggatccttctcgcaatcgccatagtttgctggatagggaagaccaacatgtgcgtcaaggcttctcccctggaagggaaagaactgcttgagaggatttggttaccatatgggctcagaaaccccaaagcggacgatgtaaaacccagcatgaacactgatggatcacacgagcactctgatcttagcactgaagcagttgatccacaagctgtctcccacagcaaagcatctgacatgggaatagcagatgccaaagaggtggaga

SEQ ID NO: 77696 - DNA, 410 bp, Oryza sativa
  unsure (1)..(410): unsure at all n locations
catgtgcgtgtgcctgcccttgtcaccacatgttataagtatatgcacgtacatggaattggtcgcctcatcatcatcatcttcttcttcttcgtcttcttcacatttgaaacccatcctgagatgggctgatgctnatgtcctgagaaccgatggactggtacgccattttggaaacgtcactgaatgatccattccatgagtggcgcatttgctggaaagaattgtaaacttcttcagcttcttttcgggtctgagtagtagtacagtttcccctttctgaagattattgagatcatattgtgcatgacgacgctatttacatatttatgatatgaatggacgagcctatactttgatagcctttagaaataagctatatggatgtttcctcttgctcattgaatatg

SEQ ID NO: 77697 - DNA, 403 bp, Oryza sativa
tatcttttttcctacttatatagaaatactccaggtatgatctactctgatactattgtgcaacaaatttcctttgccaccatgtatataaattaacacaacatttcacaaatcgacatcactaacagttcctatggttctctccctgaaatcctaatttactacaacataccttcaaaatttggtggcgtcagacgctcacagctgatatagtgttgaactgcaccaattccatatgcgttatatcatctggcagtaatattgttgggagtaacactggcgtgctttggctgaagctgctttatataatactttgatcctcctgataaaatgatgcgttttctccttgctcaggactggatgaaatcaacacttccagaagccacgccgcacaaaccctgca

SEQ ID NO: 77698 - DNA, 440 bp, Oryza sativa
  unsure (1)..(440): unsure at all n locations
tggatgaacgnaccggaagaacaacattaacgtttgtatggtattaacttactacgtacgtacggcacaacagttgtatcgctggtatgatataaacatgaggaagttattatcttttaaataataaatctaatctaatggtgtaaaataacaggtccatcagtgtaaaaatcaacggggagattatatagtgccatgtgacgacttacaaacgcttgtagaagtgacaagtgacggcttatgagtgtttctaggaagttcaaaggactttnagtatataatagataatactaactccattgcctctgttgtacgcgtgttcttttcggtgcaggtcttagctgtatgtaaaacaagacacacaattattagcatatgatttatgagtatcaattatttataatttgaaaattgatttattgtgatttttaagatattct

SEQ ID NO: 77699 - DNA, 322 bp, Oryza sativa
atcttttatatggataaccgccctgacaaaagacaaaaatcaagcgagaatactaaaccatagcccacgtgcgcaaagaagacagaaaacgttctcttaagagttaagacattgaagataagcaggacatataattaaacaaattcatccaccatttttcttggatagcacgtgattcaaccaagacaagcagataactggcatatatacaacctttaataaccctcagtgtttatgttctttcaagacatcatccaagggggatgacgcacatactcccgcatcaaaagtacgtgcgcgcggacaaaaacacacagacact

SEQ ID NO: 77700 - DNA, 205 bp, Oryza sativa
  unsure (1)..(205): unsure at all n locations
caagattctcattaatatctcataatctttttaagaactctcttgatggatgtagaggtgtgcacatatactatatgggngtgagagcacctggccaagtttgactatcatcttctcttattaagggattaagcgccggcgataaaacttttcattatttctttaactactccattcgttccaaaatataagcatttttgtctat

SEQ ID NO: 77701 - DNA, 361 bp, Oryza sativa
tgttcgccaacaagccaaatcggagcatgtgaagtaccctggaatgctgcaacctctccctgtgcctgaccatgcgaggcaaatcgtctctctggatatcgcggaaagccttcctaagtcggctacggtcaatcgcattcttgtggtgggcgacaaaatctctaaatacagtcattttgttccattgactcatcctttctctgccttggatgtggccgaagcatatatgcgacatatacatcgacttcatggcttgcctcagtctttgatctctgaccgcgatcgcatcttcactaggatattgtggactactctattcaagttagccgggcgtcactccgaatgagttcctcttaccatc

SEQ ID NO: 77702 - DNA, 372 bp, Oryza sativa
gcaccacctacgctgttgcgtggagctactttgcacaatgcctatacaatgattatgtgcgatatgctgttatagaaaatgacatttcagataggatacggccatatggatgatttcttcaacttatgtctttgcagcacctgtaagatactaggatgatatgatcgacatggatcacccccttgtcaactccacttgaagcataacactaatgtgaaatgcacatcacacctacagagaaaacgttaccttggactataatatggtattgtcactcaacatggcacactatataaaaacttatatatcatgatagagaagaatttcagaaccgtgtattcatgattgtccatacttctacatagacatatc

SEQ ID NO: 77703 - DNA, 411 bp, Oryza sativa
  unsure (1)..(411): unsure at all n locations
agcttgttttgtattggtgaaaagaagntntctctggacatgcaaaatggggacgctgatgatgccaatgggataatcccacggaataatactgccagcgacatccttaatcaaatggcatcagtactcgagagaattcatgcatctatggaatcaaattctgccataggaacaactttacttcagggtgaagagaatattggccaattcctctaccttgagggcattgagtattatatgtggaacacatatgatgttcatttctatgcatcattctctctgatcatgctgtttccaaaactccagctcagcattcagagagatttcgctgctgctgttttgatgcatgatcctgaaaagctcaagatgttacatgatggaaaatgggttgcgagaaaagttcttgtgctg

SEQ ID NO: 77704 - DNA, 372 bp, Oryza sativa
  unsure (1)..(372): unsure at all n locations
gatgctgctaaagcaacaatnttagtaacagctcgagatgagttggttgtgcgaagagtctgagcatagcatcttcatcgagttgagatgatgtccacagatggtgggtgggagctactttggaagagtatgaatattcaagaagagaaagaagtggaaaccttgcaacacatatggaccaagattgtcagcaaatgtggtggtcttnctcttgcattcanggttattgctagtggtctagcaaccaatgagatgaccaagaacacatgggaaaaagttatagaaagcagtgcatggtctatgagcaagcttncagctgaacttagaggtgctntgtacctaagttatgatgatctaccacacaatctaaag

SEQ ID NO: 77705 - DNA, 394 bp, Oryza sativa
agcttcttgtgttcttggcctctgcccgaagcattgaggccaaccccgagaagattcgagctatctagcggatgcgcccccccagcaaacttagggatgtgcaatgcgtcaccggttgcatggccgccctaagtcgtttcatatcaaggctgggagagaaagcgctacctttgtttaagctcctcaagcgctcggggccgttcacttggacggaggaagctgacaatgccctcgcccagttgaaggcgtatctcagctctcctccggttctagtcgccccggagccaaatgaacccctgctactttacttagcggcgacccctcaagtagttagtgcagcgttggttgtggagcgcgatgaagacaattctcattctgcgcaccctcactctgt

SEQ ID NO: 77706 - DNA, 330 bp, Oryza sativa
  unsure (1)..(330): unsure at all n locations
tcagttttcagctcttctatttcttgcttggaagncttcgcgagcctcttcactgctatttcttgacctttaggtacgtctccctgcaagcacgtgaagagaaattatggcctcatgattttatagccctngatagttaccagaagataccgtataaaaaaacatcaatnttatagaatanagtacggtacctgtcggtacttagctatataacaagaagtaaatttctctctattaattgagagaaaacccagacaattacattccagtggtaccttgtacactacaccgaagccacctttacccaaccctttgtgctcagaaaaagca

SEQ ID NO: 77707 - DNA, 255 bp, Oryza sativa
ccgcccggaccaagcacgagcgcacgtgaatcacgcaaagcccgcaggggaagcacaacccgggacaaatccacccaacaaccaaacccaccctccccccgaggacagcccacaaaaacccaaggaacctttccggggtgagaggtcccagcccgcccccacaaccaacaccgcgacgcggcacgcggcagcaccacgccggaccacaaagaacggccgaggacaaccacaaaaaaacacgcacaaaaccgccag

SEQ ID NO: 77708 - DNA, 353 bp, Oryza sativa
agctttattctatataatgattaattcatcgcccccgtagcggaaaacataatcactactgcggacgttgtcataaaaggcctgagagactttacgcagaatttcatcaccagtgttatggccccacgtatcgttgatctctttgaatttatcaacgtccataatcaacactgacagcggtgtaccggtccggttggcatgggcaatttcgcgtttgaagatagtcggtaggaaacggcggttaagtaatttcgtcagtacatccataccgacttcgtggcgcgatacttcttcaaacaattcacgcagcaaggtaataatttgcgatacggtatttcttatctgtaataaaa

SEQ ID NO: 77709 - DNA, 410 bp, Oryza sativa
agctttttattgtttggttaataagacagggaaattacgtggataccctcatgatagggacatctacaagggtaactagagtctattttgctctgagcccctaaatgggccttatcttgggccgcccttggcgaaaggcctttgagcccatgtagccctttggttccatggcgaaagtgctccaagcggtcgcgaatctttcatgcttcgcccggacgtttcacccaaagtgaatgttttggtcctcgcttggttgcttcgccctggtcgcagtggtttcggcagcctcgatcgaaggccctcgtggcatgcctccaacaagctcacccattctccgctatagatgtggctagattattcatggtcaatgtgtacaaactgcatggattacctcaagtcattatctctgg

SEQ ID NO: 77710 - DNA, 418 bp, Oryza sativa
  unsure (1)..(418): unsure at all n locations
gagagctacttcagcgagctcatcaatcgattctcgatccagccgatgagtgtctattatctgttggatgatggtaaggtgcatcaatgcatagtacatgacatggtgcttgagctaataaatcagctgtcagtagaagaagatnttgttacaacgtatttatcagatggtcaacagacaggtaaacatacatgtacagcacaaaagaagaagattcgccgattatctctccattacagcaataagtcctatgcctcaccagaagcatgagaacaattgtccatagtaagggccattactatcttcggcaaggtcgactcgataccacccttgtcgagctttcatgtcctgcgtgtgttgcgcctgacgactgcagtggaatggacaagaaccatcttaatcatctcgataagctacg

SEQ ID NO: 77711 - DNA, 399 bp, Oryza sativa
tttttttttatttctgaccactgggtctagtaccaaggggtaccgccccgggtggaccactctgtcaagatgatccgagcggtcaaacttgattgcaatctctgaccatcgaagatactggggcgtgtcgggctgaacagcattgatctcccgttcagtcaacttttgcttccgtttagactcataaaccatggggccgccgaaaatatgggtgagctccttgcggtggtcttgaaatccaaccggggtgtcggcgtcatccttcttcctggacgtgctttgctcttcgtcggagttctttcgagtagacttggtgtactgcttcgcgaactgcttgtagatgaagcactctttggccacatggttggagttcggtgatgccggcattgggagtcatga

SEQ ID NO: 77712 - DNA, 254 bp, Oryza sativa
  unsure (1)..(254): unsure at all n locations
gtgtcatattgctggagttctgatgcttggttcttggaacaacgaatgcgatnggcatttaaacgtggcttataatgcagagatcctggcagctggagtgctacaataagttcacggtggtgggttagatttctcagtccaattatctttgagcagaaatatgttcatctaccatatgtttcaagtaanacctttgctgattaattgcaccctactgttagtcttactgattggatttcttgcattatgcaatg

SEQ ID NO: 77713 - DNA, 341 bp, Oryza sativa
  unsure (1)..(341): unsure at all n locations
cgctttcttttaccatcttctctcgggcnccacgggcgagaagcgatcagctgcggatagaggcatccccgacgccgacgagcacaccagcggcagcggcggcggcaagctgagctgcatctagagcaccgaccattacgaggtcacgtgctggctcaagaagggcgcgttcagcgccgtcatcagggcgcgccaccgcgcgacgggcagggacagcgcgatcaaagtcctccgccgccaccgctgccgcatgggaggaaagccgtcggcgaagacgcgctgctgcgggaggcgctctaactcgcgcgctgagccaccacccctccatcgtccactaccac

SEQ ID NO: 77714 - DNA, 258 bp, Oryza sativa
cttcagccccggctccgatgataaatggttagacatagaaagctcatccagctgacgatctacccaccctagaaccattcatccatcaagctctggattaagaagaaattgatgaagaatctcccaagctgcagccgaataagcgatactgaaaaacaccttaggtttacctaagcagctcttcattccttctgctccactcaattgcaaaggtagcaaccttctttgccactttgcagacactacttatagcgattc

SEQ ID NO: 77715 - DNA, 322 bp, Oryza sativa
aattctaccgctataagcttgtgcagtctgtcgatgagatgatgatttatatagcttcaactgctgtgatccatgctttactgatttgttgttaattgttataaatatactgctagttgcgccacactgccatttaatatactctgaagaataaggatagatgaataatatatctttaactggggtgacccatacattctcatttgtttctaattattataactatattgctagttgagccctttaagatactctgaggaataagcttctgtagatgagatattaatttaacttcaattggtgtgacctatacttactgatt

SEQ ID NO: 77716 - DNA, 396 bp, Oryza sativa
atctttataattcagatcatctaaacatatactccatatagattttccacaagggtgtgaaaagagcacatcagaattactgtcaaattttcatgaacctttctttcttcaagatgcttccaagctccaattcatcaagacatctgtcaccaagttgggttcaataattactcaattgcaaatttcattttcgaaatggctctaaattgaaagtgttgcagaaatattgaaatgacaccagttcagtttcagaaattgttcacacatgtgttgcagaaattgttcagttcagactagatcagatgaaattctactactctctacatgggccggataaatattcatgggccgaaaaagccatataactggaattcatcttggctctcccccactgac

SEQ ID NO: 77717 - DNA, 345 bp, Oryza sativa
  unsure (1)..(345): unsure at all n locations
gcatacggctttctagatgtatatgacgatctctatacagatggatcttatatgaatcgcatgatgaagtaccacatgagtggatatataggaaaggaattccaatctgccgaatcgctcatgttatgatcttctacatcctaggtctccgcgttccgtcatctggcttatgttcttcatgtagcattcagatcgaatgactctatgaaattacgtcgatacttctacatattatgggtaacgtaggagacatccctnatntcctccgcgggtcttaattaccactgcttaactttcaattcgcctctgaccatcaaattaaatgtgataacccgtcctcctctc

SEQ ID NO: 77718 - DNA, 221 bp, Oryza sativa
cactaaattatttaccaaaaggtgacgttaacacaacttttcggtcatcaattcatttttggtccggaagttcgattcaacgatgacctttgttccacacacccgaccaacacatcgtgttatggtggataaagcacatattcataaataaatacaaaattcaatcggacaattcattaaaagagaacacgaatatgaagaataataaaaaaacgcacaaa

SEQ ID NO: 77719 - DNA, 328 bp, Oryza sativa
acagcaagcttgcaagcttgttttttgagacgagcagaggagacgggaagctactgggttggatgtactgctagcccttaccaccggaaatcgaaatcttgttggcaaaggataatgggagggctactgctgacacctgcccacttgagccattacttgaaattaaactctacagcagagtaaaagatgcacgaagctccccactgaatgagttgttggacagatcgatgtagaaaagactgttgaggttggctaaccatggagggatctccccatgcaaatagttccatgaaatattctacacactgatgctctttaagctctgcag

SEQ ID NO: 77720 - DNA, 419 bp, Oryza sativa
  unsure (1)..(419): unsure at all n locations
tatcttcacatgaatgtcgcaagaaattccagagtgacaccatccattccacacttggctgaccttgatgtccaggagaccaaaataactgcttagcatgctgccattcatgtggcaagatcctangcaacaactcaaggagaaaattgcatgtgaataagtaaatgtttgaccgtgcagaacaagctatgtcatataacttcttcaaaatggcatccggttaagagttatcaacaacaagatgtggtatagagtccttcagaagctcaaattccatttgtgaaaanagaatactctntcaccctcccccccggtggtaaatgttgtgaatgatccattttgccaatgaagaagaagctacccttgtcattatcangaaaggaggatctccatgtcactcagcagtactccgaacagta

SEQ ID NO: 77721 - DNA, 302 bp, Oryza sativa
aacaccgcccggacctaagcaccgagctgcacttttttttctgagactcaggacacaaagcatgggtcattgatctgggctaaacacattcaggcgatggatcaataagagccaaattcaccacatttaaacagatcccacaaaaactgaaccataccagcaagcttaatcttcctatctggcatctaatataagccaacattctaaggaaagcttataaatcgcaaatgaaatattgctgacacatacaacttcaatcttatcagatgacaacattaatttgttccaaccgagactgatac

SEQ ID NO: 77722 - DNA, 338 bp, Oryza sativa
agctcgcatctttgttataatcatgaaactcatgctccattcatgaccatgtagaaattgaactatgagcaagtaaactataccatgtagatgcaaagtttgacaaggaaaggggaaacaacttcaacttaagcaaatcatcactaccagccttaccacattgttcaataaattggccgatatgctctattggtgttatagcatcctcacctgtgaatatcgtgaagttggacacttcaaatctttgcgggtatggaactgaatctacatgttcaagatacggcctctgatatgtatgtatggcaactttggattctatttcactactattccgcaag

SEQ ID NO: 77723 - DNA, 294 bp, Oryza sativa
  unsure (1)..(294): unsure at all n locations
catggagttatgctaacctaaatctattgaccatttgttgaacgagcacaatcgcgggtgagtgcttgcgggatgtgtgtgagtgtaagagtgttgatgtaccatgtgtggatggacaattttctcataatggaaggaaataatattatgatgttntcagactggaacaagtctttcaatatatatatgaaatggtagctacaatgatgtacctggagagttcagagagtacgtgtatcaccttaatgtaattaacttagattaataaatccgtaattatctaaagataacaac

SEQ ID NO: 77724 - DNA, 330 bp, Oryza sativa
agccttttcttcactatctgcgcccgccgcaccaagcccaacctccccgtcatgcgcacgcccgtcgcccgcggaaaggggaggagagaggaataaagaagaggctgcatggggtacccacgtgggtctcacgctaacacaactgccacgttggacaaaacccggggcaaactgccctaggacctaatgagaccggctctgatcaatcaaagaaagcccgatatccgggttcgccgtctgacgaagcctctggaactcgaagacaagatcacggacctctcgtgctcttcctcgaattgctatggaacaaacacaagttcaaggacatca

SEQ ID NO: 77725 - DNA, 379 bp, Oryza sativa
agcttgtttaattgtttataatggatcaaaaaaggaactgataagtgataactaatcaacgagaatcatgtatatagcacctagaaacacatagcgaaggtctatccatgtacatgtactgacgtaggtatgaaaggacagcattggcccaatctaccaaggaaccattttttatatgtacaggttgcaaccaaaacttcccgagcatcgaaggagtaagcgtacatcggttggccctgaatttatgtacacctaaatatgggctgctatatacgcattattagatagggtcggtcattaaccgaggttccggagctcacatttctgatcgttaaatctaacaaagcccatcatgctcagctagctagatccaacgatc

SEQ ID NO: 77726 - DNA, 357 bp, Oryza sativa
  unsure (1)..(357): unsure at all n locations
actctctgagtgcaggaagaaaatatgtttgtataatgccatatgccaaatatgattcagatttcagaatagtaatattggttactgaaatcttctaaaaggaatctagttctctggtaaattcctgcatcagcctattcaagaagctttcaacattccaataatattattgtgatgttaaattaccagttttaaacaagctcatgacctcaactgtcggtaaatcaacaaacatccgatggcatgacttgccattaaaccagcttgacagacaaaagtngctgaaccagaacggctgtgttgtttggatcactggcctaaagggttcaagtatgcatctaagaactctgaaaatct

SEQ ID NO: 77727 - DNA, 244 bp, Oryza sativa
ccgcccggaccctaagcaccgccgctgtttctttgttatctaaatccctcgaccacacaagaaatatcgggatgtaacgcctcacaatgcaataaccactaggcgtgttaagcatcaagaggaccacacccaaaaccgttccaatagcatgactctatttacatacaaactaatattaccgaatcaaagtaactgcttgtcgcaggacaggattcatcactaaaacaggtgaagaccgaaaacc

SEQ ID NO: 77728 - DNA, 224 bp, Oryza sativa
agcttatcatttgctgaattctcggacaacaacagctaccaggccaggctacagatggcaccggccgaagctctatacggtcagaagtgccgtacacctcctttctgggatcagacatgcgaacgtcaactgttctgaacaaaaactttaacggaagcagaagagaatgtcataatcattatggagagattgatgaatgctcactctcgacagaagagctacgc

SEQ ID NO: 77729 - DNA, 245 bp, Oryza sativa
tgggtctagtaccagagggctaccgtccctgttggaccactctgtcaagatgataccagcggtcaaacttgattgcaatttctgaccatccaagatactggggcgtgtcgggctgaacagcattgatctcccgatcagtcaacttatgctttcttctagactcataagcccaggggccgccgaagatatggatgagctccttgcggtggtcttgaaatcctgccggtgtgtcgccgtcgttcttc

SEQ ID NO: 77730 - DNA, 260 bp, Oryza sativa
actggaccggatcttaagcacgcagtgcttttttatttgaacgtctaggtcagtttgctaagtttactgacagaatagtgaaaaataatgtaaaagcaaattaactgaattctgacaacaagttctaatctgaactgaaccaaagacacaaccggtcttataacctcatgggcaccctgcggcttgccacatggttcacataacatgttatcagataccaaccatgttccaacaataccaagtgagctaatcatcgaacg

SEQ ID NO: 77731 - DNA, 400 bp, Oryza sativa
  unsure (1)..(400): unsure at all n locations
tagcttatcttgggaaaagatgatcaaatgctcggctcgctggacgatacttatctaaacagtctcttggatgcaaatattgcatagtaaaacaaaaaatcaattgcctactatttcgtcagtacaatggagttntggtgccataaaaattaccaggattttgtaccaacagatagtaccaaatatatttttgccgtatggtcttttcagtgcaatgaacatattctacagctacatatcaccaaccattntaaggacctaaccaaaaaataaaaacatttaaaaacaaaacatgaaaggcgcgacaatctttcccgacaaaagctctgatcataaacatatctgtcgcattacttgtgcccgtttcatgtacggtgggatctcataagccagaaccatg

SEQ ID NO: 77732 - DNA, 404 bp, Oryza sativa
  unsure (1)..(404): unsure at all n locations
agctttttcaaaaaccacctgtgtgtaaccaaacaagctcttggcttcctcacagttacttttgcaaagctacttttcaaaaagtcacagcccacagctgcttttttaaaagccacggtccaaccaaacacaccctaattctgatgtttctaacagggggagtaaaaggggcaaagttattagagtttgtaagccgatctattgtattccgacattccgtgtatatctcctcttcttgaggatctgattgtaaacttccgggattccagttatatatatcaaggtccaatntggaacctctgcagtgatgaagagactgcagaggaagctacagtgcagtgcattaaggtatgctgtttgttgtagatccacatccaatggtgcaaaacaaagtgcgacagtag

SEQ ID NO: 77733 - DNA, 405 bp, Oryza sativa
  unsure (1)..(405): unsure at all n locations
agcttttttgatcttcttcctatctcgagagcaactctcgtggctgtgaaatcaacacacccaaaccttgacttaaaatcctagaaactggcccgcccggtggaaaaaaaaaacttaagaatttcattcccttggaggtttatnttagagaaaatggtcatatggccctgcttttgtgaaggtacgagtcgcctctatccacaagatgtatacgaacttattacaccgaaatgaaggccaaaataagctacttataagttctaaacacacgcctccaatacattagctaagaaagatggtattttctagagcaacaagcttcatccaaaataattattaaataactaatactggatagaaaccaccctaataagtagagtaagtattcactagaaaattggcgtg

SEQ ID NO: 77734 - DNA, 431 bp, Oryza sativa
cgggatccttcaagtcaactgcagcatgcaagcttctcttctcttgatctcctttggacgaattaaagaacttgcgccgtgccaagcaccaccagacaacatatgatcttcactagaaagaatctgacataacaccaatcaactgttagtagtaccgaaacatttgcgaagaaaaaaaaaaagctacaagcgattatcgactagtaataacgctgctttttcacactcacacttgtagaaagacttttctcaaccacaacgcgtgactctagaggctccatgtgatctattcaagagggacacccatgtataatgcctagcacaccaaaataagccttctatgacaaaatagtaaactaagctagatgcaggcacatcagaaagggacagtcacaaaagggaactattgcgcataagcgcataaactaagt

SEQ ID NO: 77735 - DNA, 255 bp, Oryza sativa
agctcttcatattttctatcgaagaggctggagtttgatttgtgaaaactaaaatggcctatatttatgtgaagattagatccttctatgtggcatgaggcaaccctgggtcggcttgggaaaggctttgttgcgaacctccgataccgacaggagtgccgaataagttcgtatcttgtgggtaaagtgtacccctctgcagaggttaactaactgttcgaacagccgtgcccacggtcatgggcagatgtgagg

SEQ ID NO: 77736 - DNA, 387 bp, Oryza sativa
aaaaaacatgggctccgtaagtgtggtaataaatcgcagcttcaaaataaaattaaaacaacataagtggttgactgctatattaacttataataagaaaccagcctatataactacatatagtgagatgagatgagatggaattcatggaaagaagtggagtatataagtaagagatatagtatataccatcaaagaaacttcacggtatgtagcgcaatgacttgcaaactattcaagcctccaaaccttcggtcgagacgagtttccacgcgagcaatccatagtgcacatggagcaagagcatgggcaccatatctggcaaagcgattgaagcccctgagtgggggaggtccccgagaacaggctctctgatagaaacacaag

SEQ ID NO: 77737 - DNA, 254 bp, Oryza sativa
gccactctggcctgatccgacaagcggttctcaatactttttagcgagggggcaacatgaacttctacaagttcctggacctaatagcgcactaaatgattagatgaaagacaacgactaataggaggggagcagagggagacgttccatgtcttcgacaaggactagaaaacagcttcatctttgccaccgagccccgccacgtcatgtccaatgtatcaaaagaagctcactgatgaagaggtcaacaatga

SEQ ID NO: 77738 - DNA, 355 bp, Oryza sativa
cctcaaactttttttttttaccccccaccggtgctagcgattgggactaactgaaaatgctgataatcccaacttaatgcttaacactaacatgcagtgtgtgctcttaaatctcctataattggaagcttctaacctctttgaacttgacagtgttcaagctactcactacaggcatttaacctgagtctcttgacatctaatcttcagatgcatgacttatacctcccaagatttggatcttataactaaagttggactgctgttgtacaaatcatgtaccaaatctctgcactaacattgaagactcactttcaatgcttgcttaaaactctgatgttcgggacctttactc

SEQ ID NO: 77739 - DNA, 433 bp, Oryza sativa
  unsure (1)..(433): unsure at all n locations
ctcgacccgggatctctaagacgactgcagcatgctactttttctatatctgccaagtgcatatcagctccaccaggagaatgaggtagtgacaatgccgatccacggggagcctcaattgatagctcacactcgggaggtgtaagctccgtcggtcgacttggacgaagagtcatcttcacaactatgtcttctttggggccatgtatgaacgtattgcgcgcatcgnccaaagacatgattttatcattgggggcacaagcagcggataacctgaccaggtgtcctttactggatcgatggacaccctggcatacctagctagcaagtctgcgccatggacctcgtctgcaaccgagggcttgaaagccatgccctcagcgattttgggagcgaaagtttggtggactctcgccagtagacacactgtgct

SEQ ID NO: 77740 - DNA, 375 bp, Oryza sativa
tttcttgtgctctggcatggccgaaaacagaaagtcgatactatgctgaggcacctatcagattcagtccactggaggacaatcgattggatttacccggaattctcatatgacccaagaaacatgcgtttcgcaatgtgtacggacggcattaatccttttggtgatttgagcagtcgtcacagtacatggccagatctgcttgttaactataacctttctccctggttgtgtttcaaaagaaagtacattatgcttgccatgctcatttaaagaccgagacaacctgtcgacgatatcgatgtgttccttgaaccgacgatcgatgacttctaaaggctatggaatgatggcgcactaacatatgacgcatat

SEQ ID NO: 77741 - DNA, 190 bp, Oryza sativa
caccgaggtgaccaccgtggataaagtgggaagatgcacggcggcctccgacgggtagccgagggcgtaggagacagctgcatctggccggcgcggcagctgttggaagatgggtctgagacccggttggcgtaaagaggcgtacccgaaggcaacggaagccggctccgcgccagaggcgcggacagcg

SEQ ID NO: 77742 - DNA, 400 bp, Oryza sativa
agcttcatcgtcacctccgctagattcgcaactgcaagcagaagaccgtccaccacctcgtctacgccaaagatcgtcgaaacgccgccgtcacagtcgatcagtaccccgtcgccactccaacctcgccaccgtcgtcgtttgccgtcgttcaagtcatcagtgagctcccctcgtcgtgctctttcctccggttcagatcaatctaagccatccaatcttggtcaactctatgtcgattaatatcagctgtccaaaatcaatataaatctgtctcctctcttcagtggcatattatttctttttaatatatgtcatctaccaaatataatctaatcattttccggaggtggttttaatcttttatctcacgtataaatcatttgtaaatggtttaatt

SEQ ID NO: 77743 - DNA, 175 bp, Oryza sativa
gagagcgatggaagatatgagaaaatcgatctgctgctaagaaaagtgatctagcccgtgggaacttacctcagcatactcagcctatggtgcatcaaatggattggtggaagacgacatcgctatatgcggaggtctcaccacagaggatgtcgcccgggagtcatttttgcgt

SEQ ID NO: 77744 - DNA, 88 bp, Oryza sativa
  unsure (1)..(88): unsure at all n locations
cttggccccntaaacaaagagagactagactgtacctgatgcaaaactgaaaaccccccaaatagaattcatttaccccttcaacaag

SEQ ID NO: 77745 - DNA, 351 bp, Oryza sativa
  unsure (1)..(351): unsure at all n locations
agcttatatttcttntttttacagcgacccacgttactatgtacgacgccgctacgctagcttgcgcgagtcgagtcatcgatgcagcacgacaaatgcgcctcctgtttcagatttgtatcggcgaaatatgaagtgagctttgctatagtggccctgaatgcgacgggcattctgctacacgtctgcaagaagccaaaatgtgctatacactgccttgtggtgcactctgcaattcctgtttcagaaagatcacaagcagtccgtggtttgttcttgcatctccaccatnttttaatgtgtgtgatgagcttattagaatacataagaaatattaaggtttgatcctta

SEQ ID NO: 77746 - DNA, 199 bp, Oryza sativa
actcacataaagaagaaattaccatttctatagctctggacgaaatcaactcataattaacggagtgttcaacttccatgataacctatatgcaacaatatatagtaatcatcacaccaaattacccatggtaacaataatggcagcatagagcttaagaaataatctggacgattttccattggatgatgtggtagga

SEQ ID NO: 77747 - DNA, 407 bp, Oryza sativa
agctttataagatctcatgtgaggaagcaatatagtagtggccgttcggtctgatgccacatctatctatcaatcaaccaaaacgttagtagtacgtacgctatttgtggagtttgcaactgtaatgttctggcttgtctggtcatagcttttgcttgtgtctgcagtgtggtgagccactttgcactgtggctgacatgtgagtagcaactcatctggtccttaatcgcgttagtatgtatatcgggtggtttatgcgctcatggcaccataactaatgcgaacaagagagaatggggtgggaaagggggtgctatcttcatagtggagatggaaatgttaaaagttgggggcaagtacaatatattgacttttggtggtcttctctcaaccaaaactcaccatct

SEQ ID NO: 77748 - DNA, 368 bp, Oryza sativa
tccaagaaaggatgtgaatagaacaattgcatcatctatggatccttacccatccaaatgatctggcaagatcaattcctggaccaagagggatgatacctgagggtggaactggttctctttgcaacctataaagatctgcgagacagccaagtaccccaaccaactgtgccattaccaccagcaacctggcagaaagaactagtgcaaggatgttatgcaaagtacttggaagacaatgagtagcccacatacgagaaattcagtaaataaagaaagaacaaggacaccctgtcataaattattttataagtagataggatagcgaaggaagcaacaacctttcataagctctaacaaatgctaat

SEQ ID NO: 77749 - DNA, 445 bp, Oryza sativa
actcgacccgggatctctaagcgactgcagctgcaagctgaatcttttacttctgtgtacagcgtctgtacaagttatgtgctgagcggaaagaagcgcgaaattcctcgaagaaaaagtggaagaaaatagaagaatttgatgctcgtagatcacaacttgagtgcatttacaatgctcttctgcgggccaatatggttaatttggagcctttgtacttttccttactagctctttacttaagtcgctattcaattttttaaagaaagctttacatatatacatgaatatagaaatagaagcatttacttatcaacattcttttcagcatggttactgagtgccatattagtaacttttcatctaatacagcaccgtagcgagctcaagtcataattatgttcattatagtggctcggcagccttatgaaagtagcaccatacg

SEQ ID NO: 77750 - DNA, 161 bp, Oryza sativa
tattctctgagatccgaaagcatagcacacttaatcatgcatctatagtgagtcacacatcgctatatctttcattggatccccaagagttgatgttacttttacttgatgagaatttaccacttgattgtcatgactacttgcttacgaaacatctatgc

SEQ ID NO: 77751 - DNA, 360 bp, Oryza sativa
ataatggaatccatttcactatggacagccttcttccattagtcttgcttaggagatacataagctcttgttattgacttatgagtgtcatccacaatgtacacagtgatattattaccaaaggacttatcccgtctttgtctcttactacttcgatgagcttcactgacattactcctagtgacatgatcatgtgtatgttaatttgttcttgtgttcgattgaactgcgaatatttcatagggttggttcaactactgtgtgtatcctacattggaaaaaacacttaaagaatgtatcatcacaaacttcataattgacccacatgccttgtatgacctctaattaactattaaaatc

SEQ ID NO: 77752 - DNA, 292 bp, Oryza sativa
tcaatatgagacttttctttttttcagccgacattggcttagaaatatactcatcaatgtctttacgtactcccattaaatatcgcggtatctctaccatgaactagcaattaatttccttggaaacatttcatgatatgcggaaaaacgctttctccgatggtaaatgttacactacatgacatttggttccctgcgcaatctgcatggttcagcaacagaacttcccaaatttcccctcttcactactagtagggcgtcaattaccactaactttaccagctttacaatc

SEQ ID NO: 77753 - DNA, 365 bp, Oryza sativa
atgcattgaagatgaaccatcatttattatcatacataagcggagatgtgtagtacatattatagagacctacatcctctgagataaccctgtacctcccattaaccctaatgaataagcacgcctaatacctgcagaggacccgtcctgacagttgcgagtgacactttacgacatatcgaacaaaaaaatactgcaatcttacaattagcgacgttaagtgagtcgagtattaccggtcaataggaacgtactaacaaactctagctgggtccggtttgtctccaccctcgaacttgtggtatggaacgcaccgccacatgtcgaccggtctcattaacaagatttaatttatatacttcata

SEQ ID NO: 77754 - DNA, 393 bp, Oryza sativa
agcttgtatatttcgggcatgccagtcagtttgatcctgcaactaactagatatataaatatgttgatcaccaaagagctgatcggctgacgagtcgatcgagcgatactagccgatgccgatagcaaccgatgtcgatagagttttgagcaatcgactatatgtccaatgtagagtctgatacttgagtaaataatgatataaagataattggctgatgataatgtaataaaacaacaatataatccaataaaaaccaatcggctaacaatgatatgatagaataagtgacccgatggttaaagcatacatcggctagtggtatgatgtcattaattaaatccaaatgattagataaacagtgaaatctttgttacaatctgctaaaaacaa

SEQ ID NO: 77755 - DNA, 370 bp, Oryza sativa
tagcttgttagacacaaaaacaagttcagtgtgcaaaagaatgcaatctaacagaaggcccaagctggccgtcgatcgaagccgtgacaactttctcattaatacagcctcacacaatctaccagcattgaggatcataaaagcgtgttatccataagaaaaaaacataacaaaagcccatttcgtttaaaagagaagaaaaagaagatcctgcggtgctgtaagacgttccagagcttgtgtgagaatctttaaaagagaaacacagctacttgtaaggcaggctttgaatcatttcacggaggagctaaagagcacagtcgccggaagcggaagggaaagacaaaggataaagacatagagaaagatc

SEQ ID NO: 77756 - DNA, 311 bp, Oryza sativa
atgcctggagaatgatctgtctacttgataaatacgttattttgttcattcatgggaccatcaattagttcgtttgtgctgggacggcgagatattaaatgagaacttgggacacaccatatatgctcatatatgacttattcaatttaaatctatgcactattgccctgtacgttcattttgtgcttcttttacttacatcttgtttcacagccctaattttttttgttgatagacaactgcagatgagacataatcagcctagtcatgatcactcgtgatcttgcacatctacatgattcttctggaca

SEQ ID NO: 77757 - DNA, 315 bp, Oryza sativa
agcttgtgcttctataaagaccacaagaaaagccgatagctccccaccacttgtcaaaggccagaagcgtgaacgcggcaaggggaaggtctgggagttggcgcctgagccaaaaaggggcaaggctgcgacgtctatgccggtgagcaaatctgggaaggtcgtgagggcgccaacccaatttgagctaggcatgccattggtggaggacaatgtgttagctgtgatgggtattgcttgccgagagctacataagcaatacatggagcttagcaatgccaagccggaaatgaaggagtcatccatagttggaca

SEQ ID NO: 77758 - DNA, 322 bp, Oryza sativa
  unsure (1)..(322): unsure at all n locations
agcttgtcttgtctatggccganagcaccaccctctactatggtggctcatgcaaagctattggggagaaaggcaacatctcatatgctttcaacagctactatcagctgcggaaacaggacgcccagagctgtgatttcgatggacttggcatgatcacttaccttgacccatccatcggtgactgccgctttcttgttggtatagatgacagtagaacatctacaatctattcttcaagtgactgttctcggaggcgctttggattgtggatcttggcgttcttggtaattgggttccttcagaataggagttatttgtg

SEQ ID NO: 77759 - DNA, 194 bp, Oryza sativa
  unsure (1)..(194): unsure at all n locations
gcgcttgctctcaacatatctctcaagatgtgattgacccgctcggtctgaccatctatttgcgggtgataagccgcgctgaaatttaaacaggtcctcaattcttcctgcagcttctggcagaattttgatgtgaactgactccctcggtcagatacaatctttgtgtggactccatgtangcacatgaatct

SEQ ID NO: 77760 - DNA, 424 bp, Oryza sativa
  unsure (1)..(424): unsure at all n locations
agctttaggcctttatcttgattttgctggcccccaagtgggtgtaactgatgaatcatgtaagcaaacaaatatggttgtctccaaagtcatagtggaaaccacgaataaagttgtggcagtgattgaggttaatttctcattattagaaggaaaatgtccacttaacctcatgtagtttggttggtcgcgatcgacttaacacctcaagtatgaagacagatgtgaaagggcatatatcctattggttgcagtgacctgagtagcaccctaagatactgagttcanattttcgtagaaatgaattntagaataggctatttgagggctaagtttctatttttttttataaaaaaaagatgcatatatcattctctaaatatgagaaacagttcacaagatgttctatcctcttaatatgaaa

SEQ ID NO: 77761 - DNA, 429 bp, Oryza sativa
  unsure (1)..(429): unsure at all n locations
accaactngcgaaacacattaaagaacttattgccaaaccttttattatactacctagagtacacagtgtgagtaatcaaagccgcgaaccctcacgaaccctgcttaacacaatgcctaccatgattcataccgaactggctacccgaccctgggtcccaactcgtcctcaaccaacctatgccaaccattccacattttagttggtaagccaaatttaagaaataaacactaacctgcgtacattgctcggcttgcccataaccgacggcgcagctattcgaataaagtatactccgatcagaggtgtacatctttacccacaagacacatcttcctcacgtgtaaacacgtgccacataccaccaccgtatacggaccgaagacgtgacataatgtccaacccatccttaccatataccagagtac

SEQ ID NO: 77762 - DNA, 442 bp, Oryza sativa
agctttctgaatggatgatgagccacatcatctacaatggtatggaccgttggatgagctgctaaatgaaaatgcaccgttggatcatcatgctcatctataacagtggaaacacgttggaccaatctggatgcttccagactaaagacctaaaaaagcagataactcatgggcttagtctatttaacactaccatttaaaaaaagtctttttaacactatatatttgtttgcttaattaatctcctgactaaataaagggaaaataatgacgccatagtcgtaagtttgtatctatgatgtatgagagtgtacatgtaaatgctctgttatactacttttgcttggtattggagcaacacacatcaactaagtagcatccactacgtaccaattttatattaaaacagtccctacgaacgcacatacgcacaccatacact

SEQ ID NO: 77763 - DNA, 410 bp, Oryza sativa
  unsure (1)..(410): unsure at all n locations
gtccaccaattggtctattctatggttatggaaatggtccttgggtgtcacgcccagaaattcccgaatagaattccaagcagaatgtgcattaaaatccccgttcaggaccggccggggtacacaaacgacaatgttgacattcagatccacgtgttacaaacatcataaaagtcttacataaatgcagcgaataatacgaaagacaacaggagctaagccttgctagaactgcagcggaaacaccactccacaggcatcctcgacggcacggacgaagcctactcctcagagaaacctccatctgacacaaactcgtactctgggggtgggaaaaatagagcaagactgagtactacccactgtactcagcaattcataccggaatangggtatgatgcagggaatta

SEQ ID NO: 77764 - DNA, 424 bp, Oryza sativa
  unsure (1)..(424): unsure at all n locations
agcttcttgatcttaccaaccatgacatcaaacagagcttgagatttgattttacggtctacaaaacacatttataataagaatgtgctgcattaaagagaggaaagttcaaattgtcagctggcagtaccttcaaccttcttcaaagctgagtccctttgcacagctagttctactttgtctcttttcaaggcttcaatctgtttctccatttgggccatcctggtagcttgtgctgtttgaaatccaaatatttgaggatacagttatgacagcataaatcaatggaatagatctggaagggtaccttttgatgaaccacttatctcgaagattgaatcctggagctgggcaattctgacccttaactccttctcttgctntttagcatactccttggcctcatgcagctggtccctaactg

SEQ ID NO: 77765 - DNA, 224 bp, Oryza sativa
atgatccgatcggtcaaacttgattgcgacctctgaccatctaagatactgaggcgggttgggctgaacagaattgatcttccatgtactctacttctgctttcgtttagactcataagacagagtgccgcccaagatatggatgagctccttgcagggatctatgaaacctgctgtggtgtgactgtcatacttcttctctgatgtgctgtgctcttcgtcag

SEQ ID NO: 77766 - DNA, 386 bp, Oryza sativa
acagctggtgctcatagaagcctctttccttggacatgagtgcttatgctggcgattagataaactgatgattcactatgctgaccggtgattggtggaattttttccaaaccttgatactgacttccgtaatccacagacgtggactctgctttgacttgctcttgattcaaccacacagattgttcaagacactggcttgatctgtcccatgtctggattgcagctgttcctgatgctgcttctctaagctgaattgttgacctacatcatggatgtatcttacaactgacatctgtcgaactgagattggtgtaactctgctaatggctcgcagctgactactttaattactaaccaaactactacactggttgttccctcag

SEQ ID NO: 77767 - DNA, 358 bp, Oryza sativa
atcagctcgacccgggatcttatatcacctgagctgcagcttttttgtatttatcttcaataaatttaagaagtggctttaagacctcacatttgtttttcctcataagccaaacggttatttggaataaaaatgaatttgaggtaacctttttatatgtgtcttggggcttaaagtcagctgaaaaaaactcttggaaactcaaattaattgaaattaaaagggctttttttgctgttaaccatcatgaagctagctaatgttaggtattgcaaaaagtctcaactcctatatttagttaaaatgggatcacaaaaaacgctgcttttacagcttttgctacaatggtcaacccaac

SEQ ID NO: 77768 - DNA, 411 bp, Oryza sativa
  unsure (1)..(411): unsure at all n locations
cctaattttcagcatcatatcaactcaagtcgttaaaagtaaaagtataaaatcctagagccctatacaattatnttcattgtttgggtcccgcatcatagcttatatagccacactaaaaatctcagcgaaggaaaaaaatagaaagaaaagaaaaacatgcgcatcgacgatgaactgtcaccgtagagcctagtagagcattatataacttcatctaattctaataaggtgcaagatagtgtttgcgatagattaagatgaagataaagtagagctgataacactataaaattattagcgcataactaattaagtgtaaatattataaatntaaaaaatagatttgttcgatatttcaaagcaacttacacatagacattatttagcaatttaaaaacatgttaataa

SEQ ID NO: 77769 - DNA, 360 bp, Oryza sativa
tactcacaattaaaaatatatgaggtgcagacgtcttcgctacctttgataatacttgccaatttaaatagaatacaacactttgacgatcagaaaaatgaagggtggaaaattccatatgcctcccaaccaaaccttatagagctctcatagagaaggagcatgaatgatgaagagaagcaaccatcagccaaacagactcctatttatattgtgcgctgctgtaatgtaaaacataattgggttcagatcaattaaacgccaagggtagcaactatacaacatcaagcacacataggctggaccgaccattcaacaacatactaaagtctgaactaacacattgaacatctatctaca

SEQ ID NO: 77770 - DNA, 427 bp, Oryza sativa
ctcagctgggtacttgatcacttaccttttactttgagtttctaactttattcagattaatccaaaaacttgtgctattaattggattaatgtcttaactccctcctttcacttgtctttagatgccgcgctacaagcctgagtacttgtttggtgttgagggatttgtccacgagttgcgtacgatgtcctttgtcattggatttgggactgcccctttttatgctcagattcctcatgatcgtcatgaagagaagtgccgagtcatagtcaccttgaacagtaatagtgaagatatcccctcagtgatgttcgaagctggaggaagaaactacatccatgcatgtcaggagggtggcaggatcgccatatgagagcttcgcgatcgctacagtgatcagatggccgacgctgagtattgctacca

SEQ ID NO: 77771 - DNA, 391 bp, Oryza sativa
  unsure (1)..(391): unsure at all n locations
accgacccgggatcctaatcactgttgctgcagctatttttattcttactcacatataatacagtccaccctattgttaacttaagttggacttgcattgtttacttgccctcaattacagaatgattcctctattaataacttccgactgcacaaacaaactcacctaatgtgttttatccacccaagcgcacctaattaaacttatataatattcaagtaatccctaaagaaagataatcatcttgataatatcacccggaccactcccaaaactgttcgaacaaaaaatacacttctcatctacgtatacagatcataagtnttctgcactaatgtaaacatcaatatataaaatcactctgaccttgacaagagctgcatgcttgtc

SEQ ID NO: 77772 - DNA, 408 bp, Oryza sativa
  unsure (1)..(408): unsure at all n locations
agcttcttcggatattaaaacatggcaacggttcggccttcacggtgacggcgactttcggcggggttctgcgcacaagaacgggtggccggtgtatagctcttcactgcgaaaccgaagaaggtggcggcgctgaccggcgactgccggggcgacagcgaatggcggctggagcggcggccggaggtggagaaagaggggagagcgtttccggcgacggcggaatacnggacttgaggggatgagtataggacaactatggggtcctttatatatccatgggaggccgggatcgagcccacaacgaccggaaaaactctggaaagtgtatatcttcgccggaaataggaaatgctgaaccgcgaaattggaaaggatttccatataaacttttgtggatttcttggg

SEQ ID NO: 77773 - DNA, 455 bp, Oryza sativa
  unsure (1)..(455): unsure at all n locations
gcgtactccgtcagaacatccctgcagaagataaggctctctaatagctcagttaaaccatttctcgatacatcgtcaagttattctttctgaattcagacaacaattcttgttactttgttcgtaatacatgaacaataaaaacaccatctttcgcaccaataaaaaagagtatgaagaaattcagacgtgtgtaaactggaaagtataacatcgatcactgttaggtgagtatgtgacctgaaagattcatgatggtcaggccagaaggcaagatttcgctcctccttgngttcaactctgagaaacagccgatcagaccagtccaggatctgatcttgtgttaccacccggtcagtttcataccctttcacctggaagttctgcccgcatcaaattgctaattttcgctcccgtcgatcggtggtgaaaactctctgccagtcaacacatat

SEQ ID NO: 77774 - DNA, 418 bp, Oryza sativa
  unsure (1)..(418): unsure at all n locations
gggaaagatagagcaaggatgagtacaactacagtactcaacaagccacaccgggagatgcacgattaatgcaagggggtacaaggggtaataatatatgggttaagtnttgcagtaaacagcatttaaaagacacttatttgctcaaagctattntgtaaagacgatcctagagatacacaatattattatatcaagaccgtgaacccacacgaacctgccttaacccaatgcgtacgatgattcagaccgaactggcaacccgacctgngtcccagctcgtcccaagccaatccgggccaaccattccacattntagttgttaagcaagctntaagaattaaaccactatactttgtacattgctatgcttgcccataatctagggcgcggctattcgaatagattatactctgat

SEQ ID NO: 77775 - DNA, 333 bp, Oryza sativa
tatgcccatgatgcctccagcttcttgtggagtacccaaccattgctgtctaccactgtggtggctgtggtactgttcctataggtaacaaacatatatacttgcttttactatcctcggtacatatatttctgattctcatgtacaaatttgatgaccaatggaatctactgtgcagcgaaaaatcgattccgcccgccactaatactaatgcagaatctggtgagcacaaagaatattcaaatatttcatcatgtgattctcagaacaacaaattgatctgtacagatgggcagaaaatattaccatcctccaatgcacaacccaggtgtg

SEQ ID NO: 77776 - DNA, 345 bp, Oryza sativa
  unsure (1)..(345): unsure at all n locations
gctatttgnggtgggtatctactagtacgcggatcataccggcttctgtagatataattatcagtacttgcaaaaggggatagataaatttaactcgtctgtngacgtgttacagatagatcagtttaattacaaagactttttaagcccacagagcatttgtatccatttcccagttgatatccaaatctaaaggtgcatatgcagtcatgtcgaacaacaagacatcagtggtcagttcatcagcagctggcagcatgtcaagaagcttattgcaatcctcaacgacgactgatgatgaacaggtgacggagatgttgctgcactggctgctgtcaccggcgt

SEQ ID NO: 77777 - DNA, 374 bp, Oryza sativa
tcactcgcccggatcttaagtcactgagctgcagcttaccattatctaggcactagtaactccacgagctatgtgtagtcagcacctggaaatcgcacgagtatatgctttatgaatgctcatgtccatcgattgatggtgtgagatgcttatttttatgaaaacttggtcactcttttctgcattggagatctaccgacactcactttatcggaggtgagaattgcctatatactagcaggacagagagtacgttattctcataatctgttatttttaagagaaatcatgtttatgggtggcttcttgtctgttgtattacatattatcctcaagaaaatctgtgtgcctcagtacgactctacctttattct

SEQ ID NO: 77778 - DNA, 447 bp, Oryza sativa
  unsure (1)..(447): unsure at all n locations
gacgaccagacagcgctgttccacatactgctgacgccaaaggagaggtggatggagaaggagtacctggaggacaagtactttctccatggattctgggcggagctcgtggacaagtactaggagatgatggagaggcaccacccgggccttcgcgacgagcggtggcacgtcgtcacccacttcgtcgggtgcaagccgtgcggctgctacagtgactacccgcaggagcgctgcctgngcggcatggagcgcgcgttcaacttcgtcgacaaccaagtgctcccgctgtactgattccggcaccagtcgctggcgagcgcccgggttccgcgggtggcgaaccggacggataaaccgctggtcnacaatgatgccgcgctcaagatggacgccatgatcgaaaagctgaatttttttatctgaataagcttggagataatcaat

SEQ ID NO: 77779 - DNA, 195 bp, Oryza sativa
  unsure (1)..(195): unsure at all n locations
agcttgctcgggttgtatgatgaagaagacatatatatatataggggtgggactctactcccggttggtgttatgaaccggngctaaagatcgccgggatctttagccccggttcataacacctaccgggagtaaagtcccacccccatatttatatatgtcancatcttcctccagcccgagcaagcttgcttg

SEQ ID NO: 77780 - DNA, 491 bp, Oryza sativa
  unsure (1)..(491): unsure at all n locations
tatacgacaggctagctagtctgcgatggagcagcatgcaagttgtgtatgctcgttacaagagtgtcctcagccaacgtccatacatggacgtttcacaaaacagcgtgcttcttagtttcataaatatcaggttccatttactaagtatttaattgtgagactattaggtactatagtaaacaaattcggagaagaatagtgatatctttaacccagaacaaatatattatgagaatatattcaattattgatttgatgagactaatttagtattataaatattactatatttggctataaacttaagcaaacttaaaacacgtcttataacatgaaacggagggtggacttattactactatatatgctgatgggcataatggagtgggtaaatactacctcgcgtctatggtataagactntctaacaatacccacattcatatatatatgctgataaatctagatatatatgtgtgcctagattca

SEQ ID NO: 77781 - DNA, 441 bp, Oryza sativa
agcttaaggcaatttctttacgtgttatctttgacgatatagaacaataaagtgcagcattccctatacgataatacatgcttacaggcagtatttaataatacaaacacttacctatcattgaaacgaatgttgacttaaccatatcagtattgtatatagaagtcaactgatattagccatacatggctgggacacgtattctgatcaacacaaataggtttgcatgcatgcgcgcacaaacttgttctgacggacacctcgttcctctgcacaatataaagggatgaagcatcttcagtccttatataaatacatcacaatattgacacaaactcaacatccagcagaaccaagcacactaacacatacatatgcgcaaacttcaaccatggctgtcataactgcagctcttcttcgcattgtcatcaccatgagcct

SEQ ID NO: 77782 - DNA, 149 bp, Oryza sativa
ccctctacacgagccctaatcgcttaattggacctccccaagaggggaatcgagccacgaacaactaaacctataaatccatgaagcatatcgaggggcaagttacctattccggatcgaatccggggatcacgaggaggaggggggtg

SEQ ID NO: 77783 - DNA, 420 bp, Oryza sativa
  unsure (1)..(420): unsure at all n locations
agcttggatattatgtttatggttttgatcaanaacgtacgataccagatggcattcagtacttacatggcctcaaagagatctccgtttaaattggtggtgctgatcctgataaatacgacagaaaggctgaagaattggcgttcatgatcgactcatgtctgcatgacagatgcatgagcatcactttacaatgcgggaggcatatgtttgatttcaacgaaaataagagtagtctgactcatgaagaacaaaggatattgaatcaacaggagatcctggaggatgactctgacgaagaatatgaccaatttattcatgactcctgggagcaagaagtgaaacacgaataaactttctaacttcctctttttgggtgatatttttaaccttttctactataacgctttttcagccacg

SEQ ID NO: 77784 - DNA, 406 bp, Oryza sativa
  unsure (1)..(406): unsure at all n locations
gaagatggacgttctattgccccggtcgaagccgccaagaactatgtacgtcacaccggttgggttgtgcgggataacgtgcctgtcagtacggtgtactggcgataaacaatggcacgcggagatcatgagagctttgttccagattctgagaaagagatgctgtggaccacaatgctcgagacattcacccttcctgcnggtacagaggacacagtgaaaaggtggactctgaagaaaatggcagaacagtttcagagcttcaagggagatctgtaccagaagtatatactgaaggggcagacaccgaacttctacacattcccaaagctaaaggatcactggtgacgagtcgttgcatataagacaggtgaacaanggcaggcgatgattggaagaaacaaag

SEQ ID NO: 77785 - DNA, 395 bp, Oryza sativa
  unsure (1)..(395): unsure at all n locations
agcttttttatatatgcggttagccgagccgagccgagccaagggcaagacctaccccaccgaccctgcgtcacgggcccacattgtcatacacgccacctaacccctaaagtatcttttccaagtcaggtcatatagatacgaagaaaaactacgaaactaccctttcccaccaccccttctttcttcctcctctcacacccttgtnggcgtcaaccaccatccaacccatncaccaaccccttcttcttcccttagccgtcgaacccgcctataaatacccctcaccccacccacctccaccatcagaggagccccgcctaccggcgaccttacgccttcttccaactaacttatctcgaagctgacgtcagcaatggcgctcgccaccaact

SEQ ID NO: 77786 - DNA, 515 bp, Oryza sativa
  unsure (1)..(515): unsure at all n locations
aactaagcttgatagtctgatataaggatgtccagtggcagctttatgttatgttatttctgatccatggatgacctgcaaacgaaatataaagattactaagaacaattcatcattcattggaatccatatggatagaatggatcttacttaaagcctgtgctgcagncattcttctacgtggatccttgcaaagcaagcgcttaacaaaatccatttgcttcagagtaagagaaagccaaagtgcctcattataactggtgtcagctttgagaacggaacggaatatgccagattcagtgcgtgcccaaaatggacgactgccacaaatgagaatatatgcaattacacctatactccagacatcagcttctgtgctatagcatctgtgcagaacttcatgagcaacataataagcacttccaacaatatcatttagcctctcatctgcataaatattagaaaagcatatttaagaatctgttaccagcgaaccatattcacttgtgatatag

SEQ ID NO: 77787 - DNA, 346 bp, Oryza sativa
  unsure (1)..(346): unsure at all n locations
atgaacataatgtggaatctctaaaatagcttgcacgctctggtccttgtggcacgtgagcactcaagcttctcctcatttcaagatgaactccttgagcctcctcaggatcatcaccaggataacaatcagctaaccctcctcggtccacctgccgacgaacccgtaggaagcatctctgcaaagggcattcaggccttaacaacttctggcaactgaatcctagtgagtagcctacattgccgaaagcgctgtggaataaaatggcgttatttctgtctgctctgtagcaaccaancaagaaaaaaaaatgacaggtcgaagattgatatgttctcgcaaatta

SEQ ID NO: 77788 - DNA, 412 bp, Oryza sativa
  unsure (1)..(412): unsure at all n locations
tcccgcaagaaagcagtatcgcacaatgatctgaactggacgaactcagtgcttgcatgtgcgcgtnctgatacgcatccttccattccgttgagacatgcaccctgtccgatttgaccagagtgggaaattgttgctcgctactccatgtatacctcctcccgaacagatacagatctttgagctcaagctcattaatcttgttgcggaaagcattcatgatccgcctgttcacccgcgagttgatcgtgtccgccgctgccgctattaatttgaaatcacctgccacaagccaaacctgcccacagattactctgatttcagcgagttcctccaagaacagaatcttctcagtatcatcttgtgtgccgtagaccgaagtgaggaaacattgaatggtgcctgcagtcac

SEQ ID NO: 77789 - DNA, 297 bp, Oryza sativa
  unsure (1)..(297): unsure at all n locations
agcttcagagacttttcccggctctaatatacatcccggtgacggcgattctataaattcattggtcacaagtcccaaagattcatcatctccacatgaagcagtaatatgagccactctctctttcacaaatctgggctttagtggcggctcatgattatgtgctcctctgtaaatgatttccaccacgcggccatcangacaatgctctaccttcttttaagccaagcaattagagttggtacatctatgtaaactcctgaaatttcactacttttcacttcttctgaccatact

SEQ ID NO: 77790 - DNA, 329 bp, Oryza sativa
cagcctaatgctcttgttccatatcagatgcccattcatcatgttcttcacttatctcttctggcctctgcgctcatcttgggctataagaagattggaatactcatcagactttgttaattcagcccatcaatatggtgcctcctgagccctctcaagattctttggatctcccaatggatcctttcctgcaaagtcaagatgagtccacatctttgccgcctaaaccaaagaggaagaaatctggtaaaagtgttctggtggattcagatatgaggagaagtgctagaataaacaagatcaatgatggctacatgttccctgatcct

SEQ ID NO: 77791 - DNA, 389 bp, Oryza sativa
ttaaatcagttgtgataaagattcaacaagggctttatttccttctgtccgggtattttactgtaccaagaggatatttattaatcggctattgatcatcttccactttaatgatattatacaaaaaactatcaatccatgcattataagggatatgagggggtgttcagtataactgataatggtctgatctgaataagaatgtacctatctggggagaagaataaccgagcaacttgtcgttaggtctttgcggagatatcgattctgccaagaaacaaccccagcccctattagttccgttatgacaaaacttctcatatgttttctccaagcaaagaaccttgttgatgcagtagttggcctactaacagtgtgtggctctttcc

SEQ ID NO: 77792 - DNA, 418 bp, Oryza sativa
  unsure (1)..(418): unsure at all n locations
tatgcagaaccatcagtggtgccacacttatcatataacttcactnggctaacaaacatcctacaagatagcatttggagaaaacattacccattcaatgcaccaaccaagggtgcaggcaagaaatgtctcctccttattcaaaacatcagtgcccttcaacatcttgaaactatcaatgacagagatcccgcgggtgcactttcctccgagcacattgtaatccagcatctgctccggataaaaaaaaaatgtcaactactttaacatactcaaatatactgtatgtccaaattctgtgggtatgattctgatatcaatacacaataaataacaatgtgtaatggaaatggaaatggtaatangtagaggataataatcatacaacagaaacacaccatcagcaaccaatcattta

SEQ ID NO: 77793 - DNA, 509 bp, Oryza sativa
  unsure (1)..(509): unsure at all n locations
ctcaagcttctnttngacactagcatagcgacccttcatgctatccgctcttatagagttgcgcgaatctggttagtcatcgatgaggcgagggccctggtttatgtagtttccacacattcattctgttggctcacaatcgcagagaatattaagactttatgctcgtgcacagtataatatgtatgtagcttatatagggcattcggtccatcgtcttttacagttctctgatgtaacggacgaatacatgctgttgcaaggaataatgtaaggtaggggaaattctgagaataaagtgtcactctctagagaggcttattttctaaggcacaaaagagatgcatatgacttatgccgngttctaaactgagtttgagctgagctaatctctcattgaacattagcatgtttctcatactgctaaactatatatattatgctaaaacgggatataagaaagtttctctatcaaatcaaataaatcaatttctaaagataccatagat

SEQ ID NO: 77794 - DNA, 427 bp, Oryza sativa
  unsure (1)..(427): unsure at all n locations
tatcttggtatatcttcaccggcaacaagcgtcgatagcctgctggattcttgggcacgagatgttgctgcgctcgcgcgtgtaatcatgtactactccagtatttctgctttcctgaataaactgcatcttttggtggctcggtgttgctgaaagatgctagcatacaagcctccgagacttgtctagctgacagtcgagtccataatctagttctgaatgacaaagtgagaggtctaaactatacctcgacaaattggtcatgggaatgctattgtcagctactagcagtatatatgttccaaatgtcgccagtgacatggtatntagttctattgactgtagcccatatcctctgtgctatggttggttggttcctgcgatgacggctgataagcaatggtacaccaactgggatcctaaccca

SEQ ID NO: 77795 - DNA, 323 bp, Oryza sativa
ctcattcatattgtacttcatagctcccggtacagcagcagcagcagaccgatggaatggtccattacttcagtatgctcgctggaatgcagctgatggtttgtaaacaacaaggtagttctgtgccaaataccgataaccaatcatattcgcaaaatgcgccagtggtacagtaggctgagagtatgggtggactaattgctgaaggagaggaagcccccttgctatactagtacttggaagaatttgggtagattgagcggtggagaaaactcctggcttcagagtctgaaacaaaaatgtacacgtgtgggaaagaaaat

SEQ ID NO: 77796 - DNA, 391 bp, Oryza sativa
ctaccagcaatcagatcctataactcctgtagttcacatagggcatcaatactagttacaactccactaagaaaaactgaataggtcaccaattcttaatttatgatgcagcgtgagcgtctagcaatttatttaacttttgagaaatgttccagcaattcagcatttttccgcctgcaataatctatagtgctgcattaaacaacttcaaggaacacaattattgccaaatcggcaatgcacctcgagtatctcgtggaagaggcgcatgttgagcgcgggcgtgccggtgaccttgatcctgaccacctcgtcgtttctccaactgtccctgattctcttcacgatctccctggtgaccccggcgccgcccaccttgatcctcgacttg

SEQ ID NO: 77797 - DNA, 445 bp, Oryza sativa
  unsure (1)..(445): unsure at all n locations
agcttatctcgatgtattaattcaatgcaaattaaatgctntctcagcttccacatcaatgcgtggattttctgaaaatggttatagctctctactgcttagttatgtacgggcattaaggcattctcagtcatttcataaggaagtaatggaaacatagttaggccatgaaaattgtcagaaaagggttgagtacaccatgatatgaactgcacgtaattatagcacatacacttaaagatgtcaccaggaacatctttgaactgcacacggacttctgctttccttgagcttagtgctttaccagctntaagaatgaaaggaacacctgcacgatatgaatattacagagttaaaatgaagaattatggtccactgaaagacaatctgaanggaaaacgataatcaatgttgtccttctccagaaccctaatgtgtatatata

SEQ ID NO: 77798 - DNA, 424 bp, Oryza sativa
ctatacatgtaggtggcatttttatgaataatatttctgttgtgtgaggaattatgatatataaaatgaggaacatttgtcttacagattgctcgatattcctggtgctttattatctgctgcatgtggactcatactggatggtataatgttcacgctgattgccatctacaaatgccctgtgatgcttttcaaaggatggaaacgactgattcaggatatgattgggagagaaggaccttttctggagacagcttgtgtgccgttcgcaggtcttgctattcttctctggccattcgccgtagtgggagctggtcttcccttcatcctatccagtattcctttatgcgcatttggtgcagtcgtggcttatcaagtatgaccatatggctagactttccctttcaagtatgctgatgtcact

SEQ ID NO: 77799 - DNA, 417 bp, Oryza sativa
  unsure (1)..(417): unsure at all n locations
agcttgagattgtttnttcttattgtctacgcatccgagatatcaagacattcatgtcctctttatatttctggtctcacacatttccgaacaaagtatgatctatatgtaatctgagcttccagcctagttcggtcttactctcctgcaacatgttcaatattgtgaaaataggagagtggttttaattgtgaaaaaactgttcgccacttctcttatcgatcccgttatctgcttcatataggccgcctatcacccaagataagaagcccgaactttaatggaccgtaatctcgatgtatcatgcaactggcacgattgtgggctttacgtggctgggccgacactagtccgagtctactccaagccaacctggttggtcggttgagggctaaaagtataccaattttgtcatgc

SEQ ID NO: 77800 - DNA, 413 bp, Oryza sativa
  unsure (1)..(413): unsure at all n locations
agcttcgngaattatcttgtcaaagcaagtcaccccttgaccaatagctcctataattggaaaatcattattattttgttggtaacttgcattattagaatcacacacttaacttgcttggcctcggtttgcgtgccaaaccgacggacctacccagtagtcgcactaatttccgtaggtcgtactaccctgattcctttgcgctccacccttgtggtacctcggtattcgtgctctctgagcgcgtataccanatatcccacatacaccgttgcttgtaaaaacttgggaaatgggtttgtgaagccttcgaaacccgacatgtggtgtcngtgtgtttgaaaataaaatgaattgtgaaaactcgcgatgcggtggttgtgcctatgtggcactgtcccgtattcgcatat

SEQ ID NO: 77801 - DNA, 421 bp, Oryza sativa
  unsure (1)..(421): unsure at all n locations
ctaagcttgtctactctatgatacattggaatatttgaataaatcatttttttattaaattgatgatatttgaataaatcatcttgtttcattttagatgaaattcaaaattctaaatcactataccttagcatacaaatttcaaatctatcgtgaatatgagatctgaaactgtgccgaacatgaccatcaaatatctatatgagaaagctcccacatctatcaaaagatctctgctagttgattagaaaaataatattattgtgactattagaatatattaaaaatccaacatgggtcttggtttccttgtgtggttgaaatataatttcttattagaggaaccgtctcgtagacgacattattgtgacatactgctacggaatntgtggatgaatatatattgtaaatattatataaa

SEQ ID NO: 77802 - DNA, 424 bp, Oryza sativa
  unsure (1)..(424): unsure at all n locations
agctttttttatatatgggttctaagctgaactctagtactgcttatcatccgcagacagactgacaaaccgaaagggtgaatcatatnttggaagacatgtngagagcttgtgctttatatctcggtggaagttgggataagaatctaccttatgcagaattntcgtataacaacaggtatcaagctagtcttcagatggctccttacgaagcactgtatggtcggaagtgccgcactccgcttttgtgggatcaaacgggagaacgtcaggttttcgggacggatatcctataggaagcagataaaaaggtgaaaatcatttcagaaagattgcgagtggctcagtatccacataagagttatgccgaccatctccgcagagattctgagtttgaagaatgagattatgtgtttcttcgtgt

SEQ ID NO: 77803 - DNA, 505 bp, Oryza sativa
  unsure (1)..(505): unsure at all n locations
acacatanaaactcaagctgataaatatatangtggaccttctagattcatgcattatgtttgtataactgtaggaaaaagnacatatggggagaccccgctcttcttaagaaatatactgaatgacaagatcatgtacatacctcattgtcaaaactgcttttcttaagaaatatactgaatgacaggatcatgtacatacctcattgtcaaaactgtcactcatccattcatatggttagaaatcatgaataggttcatgatgaggcaaaaatcatcagttgctctggcaagatgtcatgttagttcaagcaagttcaaaagatctntattccaaaaacacacactgcaacaaatgaaaagggcgttgatgattggaatatcttagataccaactcgcgcaagtctattttcatggatggatgagacatgattactttaatgtgcaccaggtgattgaatcatataactatccaatcaatatcgtgaataaacaacagacact

SEQ ID NO: 77804 - DNA, 440 bp, Oryza sativa
agcttgtttattttcttcttattctgccgcctaccttctctagcttcaacaaccctgttgatgccttggataggttgcatgccgttgggaaaaagttagacaccgtccagtgcaatgatgaggagaaagttattttcgccacccaccaactgcaggggcccgcatctctatggtgggaccacttccaggctacgcagccggaaggatagcctatcacctgagcccgcttcaccgacgctttccggaggacccatgtgcccgccggagtcatggtccttataaagagggaatttcgggagttgaagcaaggcaaccgctctgtgatggagtatatgcatgagttcaataacttggcccggtacgctccacaggatgttcgtgaagatgaggaatagcaacagaaattcctggcatgaatggaccctgaactgtctgtgcat

SEQ ID NO: 77805 - DNA, 254 bp, Oryza sativa
gagaggtcaatcactgagcccgacgttaacacagtccaaaatatcacaagaggaggcctatgaggttgcactcctcgtccgcgacgaatagcagtgacgacaccgactctatggcgccggagcgcgatccgcttcttgctggcaagcttggacactactagcgcggcatacaccatggctggtggcttctgcggcgcccgttcatgtgagcatcttcaccaaccggtccaccaccgtcgctgacgtgccgaccc

SEQ ID NO: 77806 - DNA, 465 bp, Oryza sativa
  unsure (1)..(465): unsure at all n locations
atcactcgacccgggatctctaagtcactgagctgcagcttttttgtcagaanttgcaaccctcactaaacaagaccataaatccataatgaaaaactcagcttgcctatcacctaaaaagaaagtatttgcttccttgctggacatgaggtctaaatcaaaccagatgtgagatatgcactagtctcagacatttatgtaaaanaaagagagaagaaggtaaccacaacgattcatgttagcaatgcacgttgtgaagaaaagaaatgaacaaaagcaaaagcacttgtatatttccataagtcaaatcagacaagttcagcataggattnttcaaagccctacacaatgacacatgcaaattagattaagtcaatgcanaatcctaatgccataaacctctaatcatcagctcattgacttggcactggcaggctgagatcgaagtcagtcatcactaataac

SEQ ID NO: 77807 - DNA, 464 bp, Oryza sativa
agtatatgcattcttaaatatttgaatatattattgtcgtacaagcactgtgaattcgtggggttctatcaaataatatgaattcataatttcttcatgtctctatggtaaaacaagcatgtaacagcagcatttttttagagaaggtatttttacccggcgtctatatctaaccggatatatgtagcttttttagcctttttttaatataaacttagtctatcgaagagaaaactagttctcaaataacccaatctgaaattcgctcctatgcatatttgaacttataatcttgggtgctactcaggacactgcaaccactagactacatgtccttttagcatggtatgtactaactagaactgtgacgatttcagtatgattctgaagtaattagaaccatcattcttcatatcagaacccagagtgacagatggtttcgatgcacaaaacttgttacaaac

SEQ ID NO: 77808 - DNA, 431 bp, Oryza sativa
  unsure (1)..(431): unsure at all n locations
agcttatttgtattaactattttttcgaaaatgaaggagtactatcaattattgtttctcagagaatgacactgacaagttagtgaactaactattcttggttctttatgaaagaactaatgtgattattcattacagggagatatgcggctaagctgtaccactttaatgtaggttatacagcaacaaaaatattgcaaaccactttatcggcacagtgcttgttgcattggtttatataattgcactagtatagcctatatacagacatgttattataactctcttacacacacaatgcactgtctaaatggaaaagctcacatgctctgtgccgcagaaagttagcaattcatatgctgttgggatgctagttgttttgttctaactttgtgcattttctgcatattntaaattatgtactaatatat

SEQ ID NO: 77809 - DNA, 375 bp, Oryza sativa
gagctgctaaatcaatgtatgcagagggttgccaactcgaacctggacaatcgttacctcgagaagcggctttcggatgatctgtacgccaagctgaaggagtttcgcgtgcctgatgaaccacacagtggcattcttgaccctgagcatgagaagagggtcagaaacattcacaagggccttgattccgatgatgtcgatcttgttggcatgcttctgaaggagtccccggtcaccttggatgatgcattcgccatacactacgctgcggcctactgtgagccaaaagtgttagcagaattgctgaaactggaatctgcaaatgtgaacctgaagaactcaagtggatacacgccgctccacatggcttgcatg

SEQ ID NO: 77810 - DNA, 421 bp, Oryza sativa
  unsure (1)..(421): unsure at all n locations
agctttcttattattcttctcaattgctggtatgaagtttgaaagaattgcttgtccaatgatcatgttatcaaactcaaattaccatcagattctgatggaagaggctcaatgtacctgcatattgttgcttattgtgaagacaattgatagctccaactaacttcattagaataatcgataaatgtatccagattacaactggttaggaacttaggatagcatggcataagcaaaaggactaaagtaaaccagaagattttgattttctaacggagtttggcggatctaaaccttctttcgtgcaccagtgtattcaagatacacgcacatatcttttgtatgatgtattntacacatacatcatgatacccttccagagaaaagtaaattttagtatttatgaccaacaaaataaaca

SEQ ID NO: 77811 - DNA, 443 bp, Oryza sativa
  unsure (1)..(443): unsure at all n locations
attcgctgcccgagtgctcgagagtggttgtttcttcctctcacatgtggagaggaagcggaatggtggcgcaacaccatgagtggcgaccacgaccactacggcgatgtgagtgcttggaagaaggcggatccgtcctcgcgtgctgcacggaggatgcggaagggcggcacgacatcgcnagcggcaaccacaaccgctggcagctggggcaagggctgtatcgcggcacacaactgcggcgaccaagggtttgggttttggatttttctttcttttnttattttttacatcattgcaatctagcatccttatttgcccgcatgccaaaatacggtctttgcaagcgggtttcttaagtcatctgtccgcgaaaatgatgtatgcatgcaattgtgttgcccatgcaaatgccgattttgcgacaccttgcgctcagcgag

SEQ ID NO: 77812 - DNA, 162 bp, Oryza sativa
  unsure (1)..(162): unsure at all n locations
agtaccatgtgtggcactggatgtatggcactagttgatgtggaatggcagtgagtatctctggaatggcttctaaattattgctgnctaaaattttgtttactgtccaacatgcttgtaaatgattgttgtatggatgtagggagcgtatcctatgcacac

SEQ ID NO: 77813 - DNA, 422 bp, Oryza sativa
tatcttatggacttttatctaacccggcgcttgcctagcttagatatatagctatcatattccgtaggatcatattaatttttttttcaattatatgaaagatgcacacaccatcatggacacatacacatagtaatgctcaactccactagtcaagtaacgtacgcatcaaagttgctccctgtatccgataaattgatgacctaactaattaaatagtaattataacgatatattaaataatagaaaatcaatcataaacctctgctacgataaaagggaatttcacatgttaacccctcctaaccatcaaccatagcgtgcaaccacccctataaaaaaactaacccactcccacgtgaaaacaggcctaaacctaggtattcccacatgaaaatcgatcctccattttctcacctaag

SEQ ID NO: 77814 - DNA, 352 bp, Oryza sativa
  unsure (1)..(352): unsure at all n locations
cacacacttatctgtgttattcttatgcaggcggagcggatgttctcacaagatttcgctagatctgaaagtaaagtatcttgtgtgcgcgtatttacaaccaagtcatcgacatacgcctcaacattacgttctatttggctacccaaagaaattcgagtagtacgctgaaaagtgggacctgcattctttaacccgaagggcattgatgtataacaatagggttctacggtggtaatgaacgcaagtttttcctcatcctccctagccatgcgaatctgatgataaccagagtatgcatctagaaaacacanaatgtcgcaccccgcagtggagtcgacaatctgatcta

SEQ ID NO: 77815 - DNA, 419 bp, Oryza sativa
agcttggaatgttttattattctttgatgggcagagagacatggaagcatgttatgcctgcatgcatcccttgttattgcccacacaaacagacgcgtggacaccactgggcagtctacctccggtcaatcatccacaggcttgtgtagaccagaagccgcgacgagcagccgcaattcggacctataccgggattcgtggccaagtcgatagagattcactgctccaccaaacatgccttgccgcacgaatgccagccatcggcgctgcttttttcgagtcaagcaagtgcatataatcctgagctcgacgccatcttcggctaaggctgctgaatagtagtggctagcaagcagcacctgtcgactgatgagacaactcatgtgatcaccacagtatgctgatcctgttcacctgtg

SEQ ID NO: 77816 - DNA, 326 bp, Oryza sativa
ttctcttaaaccttatcatgttgcctgtcatattcatatgtctacatgggattgaagtagccagtgttgatatagatatatgcaagctagactcaatgatgctgaacatcgtttttttaacagtcatgtaaagaaatatttaacttacacatacgagtgcctacaaatctgttttagaagaaccaaactagaatccttctgatgctaatagatagcatctcctgtgtggcctgcattatgtacaaagctttataatgctccctgaattggttctggtaggctatcaaaattggggctactgtccaaaacttcatctggtgctcatt

SEQ ID NO: 77817 - DNA, 412 bp, Oryza sativa
  unsure (1)..(412): unsure at all n locations
agcttagcatattttctcatggcattcaatagctatggtattcacaatagtttatgtcttactctagaaaatggtatatggatgtcacgagatcaaattgttatggaaaccataactttgatgcaccagagaagcttgttacataaaatgctatgctcaatttgtatagaataaatttatgaaaaaagtaacttcaagcatatccacacaggacattttgttatgctgggatctttttggcattctgcaactgcaattccaatatttgaccttgggggagaggtcaatgttgtacaaacagttgtgtacacttaagaaacaacgatgaacttncttgttagttttgcttatgataatgagttgttggtgccttggtggtggtgatctgtgcggcatgcatagtagctgcttg

SEQ ID NO: 77818 - DNA, 448 bp, Oryza sativa
catttctaacaattgccgcgtctgcattcagcattgagactattagtatatgatgcatacagtgtgcttaagaaaatgccctactatgaagcagactaatgtaaggctacaaactcaactgtattacataaaagcagctttcaccttaatctacacaggctcaaattttaataaaatgcatgggttcagatttcaattaagaccattactctgcatatattgaatcaacagctattaagctgatttcacacattcaatctacagtgagtgtgctgacggcacacaaaaataacagcgaatgtgcctgcggcagagggttataagtaactaagcataaatgatgtaattataccagagagaccagataccttagtgtatctaatccttcttaagtcaagaccatgcttagtgctccagctacatgctaattcccatggtaactttacac

SEQ ID NO: 77819 - DNA, 431 bp, Oryza sativa
  unsure (1)..(431): unsure at all n locations
agcttcttgcttgtttgtgtgttggaatgaagaaagtgacccctttatatagcctcccaatgatggttatggcagttggaattgtcagaaatgccctgcaaccgtcattaggagtgcatctggagcgtccatgtggagggctgagctgagccggtgctaccagggtttgaccgaacctgggccggcccagcaagcctctatattnggtcagggggttgacagatgggtcctcatggcagttgtggcagttatgacggtttccaggacggttacacctgacatgtgggcccttgtattcttaagcttgcttaggagtgaagttttcattaatttcttctttattcatgtgctaatctctgcaaacaaataatactccaggtacaagtggaaatatattattctataataaatatgtattgcaagcatagcta

SEQ ID NO: 77820 - DNA, 398 bp, Oryza sativa
caattcactcgtcccgggatcttatatcacctgagctgcaacttatattttttttctgtaaaaaatctaaattgctacttataaaaacattttttaaaaaaagtaacttaaaaaaaatgctaaggacgcacaaattctttacatttgaatggataacagttatagagttgtcaagcagaattaacatctaaccaactattcattaatcagttactctacaattttattacaagttgtctaacagtattaaacatttgactcagaaaacaaaagaaacccagcattcttacctaaaggatcgactcagagggttctgcagtaataattgcctgcaagataaaaaactactcttctgagaatgaatcagaatcaatatgcacagaaagtatactgctcat

SEQ ID NO: 77821 - DNA, 372 bp, Oryza sativa
tctcactctgcatcacgcgttcccagacctcatggcccatgatctctggatcgttatggtcggaatcgaaaaggtcgccaacaaccacgccgattatcgggagcaagtcgatcagcgatctgaccgtggtggatttgccggtgccacagtctcccatgatcatgacaccgccgatcttaaggtcgatgacgttgaccacatgcacagcttctcttgtcctgccccgatcgccttacggattcaccggcgtggctttcttctgcccgccgcttagcttctacgcgcatttaccaaaatgctggacttgagcaaacaatcacccaatctcgaaggatttgaagcatggggtacctcttggtgtgcgaggggcgt

SEQ ID NO: 77822 - DNA, 440 bp, Oryza sativa
cagcttcttatttttcttcatcagcaagaacgccgaccccaacgtactccacggagccctcgtcggcggacccgacgccaacgacacctacgacgacgaccgctggaactaccagcacgccgagcccaccctcgccggcaacgcccccatgttcggcgaatgcgcccgactcgacgtcttgcccggcgatgacacgccggagtacacgccggcgccatatgcccactcgccatcaaatggttattaattaacccaatcaacaatgcaatcgaacctgtaccattgagatctcctgcaagtgatcgtgcgtttctttgtcaagcgggtcgccgatggagatcgtgcacacagtgacgaacacgtggaaggcaaacagcgtggactactaccggcacgtggtgacggcgaagaacacatgcggacacgccatcatctacctg

SEQ ID NO: 77823 - DNA, 481 bp, Oryza sativa
aaaactcaactcactagaggcaaagatggcgatatgacccactttcttgtttttgagaggatcagtgatgacgggaagctactgagttggctgtactgcaagcccttaccaatggaagtcgaattcttcttgacgaacgataatgggatgtcttctgttgacgcctgcccacttgagccattacttgaaattaaactcttcatctgtgtaaaggttgcacgaagctccccactgaatgagttgttggacagatcgatgtaaacagactgtcgaggttgcctaaccatggcgggatctccccatgcaaattggtccatgaaatatccagcacactgatgctcttcaagctctgcagccaaggtggaaccgtgcccaagagtgcactgttcgccaggacaagaacctgcattctcttgaacccttcgatgccgtccattggcatggattcaccaccactgaagttattggtagcaccacacta

SEQ ID NO: 77824 - DNA, 417 bp, Oryza sativa
agctttgttctttctgttctataaataaagaacgaaatcaatatataagatagaataaaaaatctgaagtgaagagaagaaaacaaaaaaaggaatggaagagaggaagttgttgttgttgctgttttgtttgtgttattttcgtgctattttgagtggctacgcttgtgactaggctcgcgtctctaaagggttttgcctatgaccagcacaataccatcgctgaatgattattcaactcgctttgattaatgtggttctaactgtaccttgatattacttgcagccacctatagctccacaaatatttatctactatatcacaggatcgtgcttgttgtcggctccggtactactaatcgttgttgctgttcttgctgtttgccaacgccttttacataacatagtaagaacatg

SEQ ID NO: 77825 - DNA, 309 bp, Oryza sativa
acttcgagttgacggcgacgacgggctttccggagtcttcgacgcaagggaaccggctgccgggcttgctcttgaccttgcggagccgagagaggtggcggcacaggagggcgactaccgaagcgactgcgaggtgcggctggaccatcggccggcggcggcgaagcttggattcacgtcggtgatgtactttcagacgtcttcggcgactgggaagtggaggccggtcttcttctcctcctcgtgaacccaaccgcggcagcggcgaccgaaggcgacgaccacagcgacagcgcatggctgctggag

SEQ ID NO: 77826 - DNA, 450 bp, Oryza sativa
  unsure (1)..(450): unsure at all n locations
cgaatcactcgacccgggatccttatatcacctgcagcatgcaactttatgttttatctcctgcccaattcctccagccgtctagagtggtaacctccaaagtaaaagtccaccaaagctcagagatgacactgctaaagatctacaaagatgcaatgcacttgtattgtcttaatcaactcttgaacacctcaaatcgaagaaatgtgcttaactggtgcagagtgtncaagggctctaatgaattgaatgaagtgcctatgaagttcctctcctgctggttggggggggggtatttatagcccaacccaccaaaactagtctttgggggtcaaaatcccccaactctgtgctctattggtccgaccaccattgatgggcccaatctatacagcttgccgccctgaaactagttcaaaatctatatgttgcgggtgcaatatatgcaat

SEQ ID NO: 77827 - DNA, 404 bp, Oryza sativa
  unsure (1)..(404): unsure at all n locations
ctcagctntanctaacgcatcagcgccgtgttcctggaccatgctaatcttacttatatctttcctaccactgntagtatgcctcttccacaccccactgtaggctataactagctgttgttgctgtgtcactcactcactgtgtggatcagcatgttgatgtgtatatactactactactacaactactactacgtaccaatccactgatgtggctagatgaattgcatttgccgacagatttgcgagcgttgatttacgtttctttctaatacgagggttgcgaatctggtaagattgattgcgccggatatagacaatccatagcaaaagtagtagctttatttacaagtgagagcactgaccggcccatccctctttcatatcaatatggaggctaagga

SEQ ID NO: 77828 - DNA, 431 bp, Oryza sativa
  unsure (1)..(431): unsure at all n locations
agctttctaacagtttcagcatgcaacactttgtactttcagtaacatcactcaagtattctatacaaaaagaaccattatcaattaatatagatataggatcgtcctatcactatcatttcctcctaagcggcaatatcttcttcagttcattctgaaagagaaataagaagtatcaaaagatttgatgatatttttgtgtgataatccagctgattcatgtggccatggatttctctgtgggtttgtaagtgggtggcggcgcaaagtgtgttctaccacttgtacaaccaagtgtcctacatgtcattggacgagatctcaccactgacattcagcatcggcaacaccatgaagcggatctccgtcattgtcgccttcatcatcatcttncacacgccggtccagcccatcaacgccctcggagcccg

SEQ ID NO: 77829 - DNA, 421 bp, Oryza sativa
actcagctactgtctgccaccggtatccggtcacgtcgttttctatagcagtttaaagttagctcactactactccaatatctataccaatgtatagcaattcataccatagttgctgctatactataatatctggcccacctgtcatacacacgttacgtcttgagttcgtgctgcagctggctacaaagctaatatatttatagctgacttatagcctgctattgtacgtgctctaatagcttaaccgagaaatgtggcgccgatctatcgccagagagacccaaggcgaaattatacgtaacagcgacgacgcgccctgaaactgaaagtacgtacgttgcgttccacgatgctatttgccatggtcgatcggaatttcttctacctaattttggctgtgcctgtctggctcagcctc

SEQ ID NO: 77830 - DNA, 412 bp, Oryza sativa
agcttgttattatattcttacattagcattagcagagtagaagttaatgagataacaatgatcacaagggctgtagtgatttagcagaagcctttttctctttaaatattcattaaactcttgatcttttttgagtatttacaattgacaatctgttcagttcactattttattgagcctagtccaatcaatgtacaaagccacgattattcttaatacactacagaggcttggaaatatggcgcatcgagaacttcaagccagttcctattcctgcgtcttcatatggaaaatttttcatgggtgattcttacatcatcttgaaggtatccgagtacatattatatggtgtcataactcataatccatatatcatcctctcttttgtcctcttattcatatcattagtctt

SEQ ID NO: 77831 - DNA, 429 bp, Oryza sativa
  unsure (1)..(429): unsure at all n locations
taagctgtggacagncgtgccgccctgaggtggtcatactcatcgcgcttgtggtggagctnctcgntggaggtgaccgacaccagcaggtccttgtcgacgaggcagtatccgtccctcatcgcctcaccttattcggcgccgcgcctctcttcttccccatctcccaccggctgtctctggtctccccctttccctcctatttttgcaaggcggcggcggcggtgggcggaggcggaggccaaagctccaccgagaggctcacctcacttccatcaccagcaccggcatcgggatgcggtcaccgctcacgtagaggttctttacggcgacgtgcaccacgtcaaacatgttggtgtagtggagtagcgccagcgtgtgcaagtcaaccatcttcaacgacggatggagcgtcntgaacagcgcatt

SEQ ID NO: 77832 - DNA, 431 bp, Oryza sativa
  unsure (1)..(431): unsure at all n locations
tagcttatggaaacctgagctcatgcaatatatgagtaatatacagttatgtcgatctagttaattaatactccatctgaaacagatgcagtatattaacctagtatactagctagctaatatactgctacttctgtcgctctagtatattaaacagatctggttgtaagacgttttgattntggtcaaagtcaaactacttcaaatttaactaagtttatgcataaatatagtaatatatataatatcaatttaagttcattaaatcaataattgaatatatttttcataataaatatgtgttgagttaaaaatattantttttttctacaaacttagtcaaacttgaagctagcatgtattttcttggntcaccttcctctgtctctcggtccatattctacatacccatattggaacatagacaatgg

SEQ ID NO: 77833 - DNA, 356 bp, Oryza sativa
  unsure (1)..(356): unsure at all n locations
attgctcccggttggtggggatctacaagcagtgcgtgcgtggcttctggcacgacgaccgctacaagaacgatctccgctacctcaaaatgtggctggaatatgtgagtttcatgaattcaagattgggtctgacgtggattggctggattggattggattggtttggttttcttttgaccatccagttggcttgatcttaatctgtatgcaggcggagaattgtgctgattccgaggtgatattcangttcctggaggccaaccagattggtcagagccataccaattactacttgtcctatgcgtcggtaatggagtccaagaacaagctatagaaactaatgagaattttac

SEQ ID NO: 77834 - DNA, 404 bp, Oryza sativa
gagctgaactgaatgatgtgcgttctgtgtcgtgatcacagcgatgcaaggagatgtgtgcagaggtgagtatatatagaagaggcccgcgtggccggtgtttccacacttggcgcgatgccattggcgtggcggtggttcacgggctggcctgcgccatggcatgggcgcccaccatgcgcgtgcacctggtcctctgcgctggcccgctcttcaaagaagcggtttggtgcagtgcccttgtggtgctcatacaccaggcctagccaacacctcctgttcgcctggtggttcacatgcgagctatgcgaaaccgagcgagcgatcgatgctgttgcttgcagtaaccccactaaaacaagctcacgtgctgtgaacacattctcggcctgttctggtgtctc

SEQ ID NO: 77835 - DNA, 325 bp, Oryza sativa
ttcccaacaccgaccggatcttaatgacgagcatgcaccggggtttttatgctacccataatggtggctcactgccgcttatcgaaacgcggccactgataataatggcaacgcaaccctgggcgccggcgcgcaatctagttgaagtatatcaatttgcattatcgtatatactatcagcgacacagcgttaggcccatacgctaaaataccccgcctgcctataatctgtgatattacatctgcgctggacatccaaacgctgaaacgatcgcacgatacactgccctgcttaatgcctgggaacgggaaaatgtctatggcc

SEQ ID NO: 77836 - DNA, 418 bp, Oryza sativa
agcggcacacgtctttgttccctgtcgtcgctggccgacttgcgcagcagcgccggagcaggaggaggtggcggccgcgacgccaactacgacacgctcgtgccgccgtccttcgtgcgcaccgacggctgcggccgtggcgaccgctccccaccggtccacacgttcggcttcagcaaggaccacgacgcggtggcgatgcacaccatcgccgaggtcaccggcgggacgttctccttcatcgagaacgaggcgttcatccaggacgggttcgcgcagtgcatcggtggcctcctctccgtcgccgtgcaggagctccacttcgacgccgagacatggagaggaccggacagaccacgagcgtggccggcgacgaagaggcggagtccggcgtcgccgatcgctccgtggaggtgga

SEQ ID NO: 77837 - DNA, 415 bp, Oryza sativa
acttactaatctcatgcatgctttctctatgggtcaaagcaattatgcaaatgtcctacccatatataatttagcaccaaatggttgaatataaataaccctacccatgaaggcagtagaagtgatgagctgccttttgtccaacctatgttgaccactgttgttagaagcttggagctatctatcgaggagattaagctaccgacaggaaattaaagccaacaagtcggccaccggttcggatcccgatcgtttgataacaacccgttacacatcattctcacatcgcacaactagtacagatcctctcatctgtgatggtacctcacatacctaggttgtacaggccgtcacaacgaagtcatcttaaacggactctaaaatgacccgacaagatatactcgcacatacatgc

SEQ ID NO: 77838 - DNA, 428 bp, Oryza sativa
agcttcatctgttatagagttaaacaacaagaacagatatatcaagctcttcagtgaaaatggaaacagaagaactacaataatcaaccctaatcatgacaattccattgataaaaagtaaaacatcgctcttttgcagaaacatccattctcaagttccctcttttatgatcttccccttgtgctatgtcggcaaacaagagaaacaaactaaattaaagtcttttgtttcctgtaacttttgggtagtttcagaataagatacatagctattcttctcttgagcttgaagatgaaagattccatgccagaactttcttgaccaactaattaatctggactttggtttcattccattccttattccatatgagtacagtagtacactagtactggtctcctttcctgaaaaaaaaagaagagattca

SEQ ID NO: 77839 - DNA, 283 bp, Oryza sativa
tacatgtgaaatactacgtcgatatgatattacttaatatgggaactgcgaagattcagacaccccagaaactttggaagagttaatatgaaataatacatattgcgagcataacttaattaacaaataaccacgaacaatatgtccctatcaacaaatctagtcacaaaacatctaattatgaacagagctcggattttgccggggtaaagcagatcatcttgacaagatttacccagatccacagagagctaaatcggtgactgcactcagatctggacca

SEQ ID NO: 77840 - DNA, 354 bp, Oryza sativa
tcacaccacagacgtgagaactgtccacagcgacctctattagctaggagatgactaaataaaatttggctgctgagaatctacttgagcaaacagaccccgctaccagcgagaagaaccttaaacttctaataacaaagactaactccgagcgctcatatttttagctcggatcatttgcagagctaccaagcaaaccgatactatctagactgggaacagagtccactgaagcgcccaagtgataccttctctgcacgcaaacaactctacttctcgtgcactgatacagatattcagagtgttgcaggaagcaaaaaccaccctcccttcccaggccctcaagactatgcc

SEQ ID NO: 77841 - DNA, 378 bp, Oryza sativa
  unsure (1)..(378): unsure at all n locations
ttatatgaaagtgcacaanagtaatgcgaacaaacacactgcaatgtgtttctattatcagaaaaagacatactatgtcacagagaggggtggtataacgcgtggtggtgttagattcatcgcaagagccttcatagtttaatgtgaggggaactcatgttcttgccaaaggccattgctctccatatgccttgctcacatcttatacancgttatctgattcatacaattgatgaggaatctcccaaccgaatgccatatcagttctcttcaagagccagtgtgtcacgcccaaaaatttagcccaaatttccagactattatgtgtattaaatccctgtccaggaccagccagggtacacaatacgacaagtaata

SEQ ID NO: 77842 - DNA, 441 bp, Oryza sativa
  unsure (1)..(441): unsure at all n locations
agcctgtttgtactccggatatacctatagtacgttccattcgagcagatcacacatcctgttttacctttaatttgatctaaaactgaaaacattgctggataatcgttaatggtcacgaagatgatggccttcactgtgaagtattctcttaagtactcgtcccacactttcaatccctctttccataaatcagccatatctttcaacaatggttcaagaaatacgtcaatatcaataccatactgacggngtccctgtatgaggatacagagtantacgtattttcacttttgacaaagccaggtaggaagattatatatggtgagaagcactggccaagtaatatgtgagctgctcatgtctctaacaggattaactccatcagtactcacggcaaatctaatgttccgtgtgtctttagcagactctctatactga

SEQ ID NO: 77843 - DNA, 417 bp, Oryza sativa
  unsure (1)..(417): unsure at all n locations
agaaataatgaatagtcagataacatattcatatgatgatatgaacagttatgggtacggaagcttcatcgtctgttcaagaagcagctgacaaagtaaattctatgctaatttctgcaatgaaatgtactttttaattttttggatcaatagaatattgaagatcttgatgtataggtccatcgttgtgtactactttcaaactcccaataaatctgggcactgtaagtcatgtaggattaattattccatttgaaaagtatattcaactttatggtatttttagtctcaagattccctggaccctaactgttatgcacattgctttttatgcaggtattgacagcagagacatttgagcatctcggaattttatttcacttntctgaagggactcctttaagccaagtggctaca

SEQ ID NO: 77844 - DNA, 426 bp, Oryza sativa
agcttatcaagtctactttcacatggatccagccacatgtccatatctgttctggagcggccgcaattgtcattttactcccgactattttctgtccatggtgctgcgtcacctcttttggcccaatgggctgtgtatccatgttgggcccattatgggcgcgtcctatggttggagcacgaccctatggtcgttcttcccctctttttatacctctagtcgcccgccagaacaggcgggttttgatgatagagttagcttcttgctaccggctcgcagcgcgcgtgttggctaaaccgcccgtctgcctgtaatcggaaccccaccatattgtgtttgatagtgaaactttcatctttatctagcaatatcagtgcttgtcctacttgttcttgcttgttcttcgattgcttgcaagacgagtgc

SEQ ID NO: 77845 - DNA, 413 bp, Oryza sativa
  unsure (1)..(413): unsure at all n locations
cgatctcttctcgtatggcctggtntcgatctggtgcgaatcttctgcagttttgtgcgaatctaagtagatccnctacctggcgcgccactgtcgacggtggatacccgtagaccggatatagacggtattagggtacgctggtacgaggatctacgtagtacgacatcaagcaaacaaaagacatggattatactggttcaggccccttaataaggtatagccctaatccagtagatatgggattatatcatcgatttccattcaaccggtgagccatttgtcgatgtcttgcagtaatagcaaccttatgtggagtttacatcctgcatgtgatgttattgacatgcatgcaatagaacgagccgttcaccgccgtgacgcactggtgcatgcatgtgcgtccgagcgct

SEQ ID NO: 77846 - DNA, 411 bp, Oryza sativa
agctttgtacttttattataatactcttctaaatacatttctggtattgaaatactttccgagtatatgagtaccaactttacattatgttcttgttataatgaatgtacggctagcttatttgggagatgctttggtgcgggtataatggttggttatgcaattactctatgtcatgacgatgatattagagtagtatctggtagtttaggcgtggtgtctacataccagatatcatctattgggttatatattgcggatgagatgtgggccgatgatggtgatagctcagtatgggtattcctccgtgcctatatataatcctaagttaatttccgagggagagtattcctccgtatttagccccggttggatggtcatgacgggctgtcgtaacaaacttcgcagtca

SEQ ID NO: 77847 - DNA, 312 bp, Oryza sativa
gagccgtccacgtcgtcagtggatggccggtgagggagggactccgccgtcagctgatataaagccgtggatgcggtcgagcatagcgaggcataggtctgactctctgcaatactcggctcccccttctccttccatggcgtcatggcgagagagataagcgcttggcgatgactgctaccaccgtctgtgctaacgacatgagcacaaccttgcacgtccagaccaacgcgtacatcctcgactacagtggcgctcggttacgcctcctccgttgccgtgagccagcacgctgtcgctgccgctgacatg

SEQ ID NO: 77848 - DNA, 392 bp, Oryza sativa
  unsure (1)..(392): unsure at all n locations
agcttgtctagctagcagtgcttgattgaagcacttcatatccctaaaaccaagaccaccatgagatttgggatataagatcttttcccatgctatccagtggaccttcctttccccattatcatgtccccaccagaagttgcgaaccatcctggtataatcatcgcagaatttatctgtcatcttgaagacccccataatataagtatgcaacgcttgtgccacactnttgatcagtacttcttttgcccctgacgacatatatttttcattccaatccgacatccttttagataacttatcatttatcggttggaactgttctgctttcatccttccatctggtgttggcaaccccagatatttctcctcaagggtgaactatgcacctg

SEQ ID NO: 77849 - DNA, 495 bp, Oryza sativa
  unsure (1)..(495): unsure at all n locations
tcttggatgagagatatctgntggtgtggcttgcttgtgccctctcgactaattaacccgtaaaataagtaatcgctgatatgattttcgttgcgttgtaattagccttcgatgaaatgatagatttgctctgcgcctgctgctctgctgggatgttaactctgcttcgtttgactgcacgcttggcacgtgttgcggctgtgaaagctgttctgttctgttgtgtcgtggcacacggtgaagccacgtctcgtntttctcggggtataagcgggtagggagtgggttcaatctttattattcggcgttggcatcggaggatgccgatttaccgaaattttcgaactataattggtcaaatctaaacacaatattaccgaattcacagaatataaaagaaagaataataattttgaacgaaatgatatcatatgattcatatctggggtgcgatagtaccgaaatttagaaaaaatatgtcgatattntgaactc

SEQ ID NO: 77850 - DNA, 379 bp, Oryza sativa
  unsure (1)..(379): unsure at all n locations
agctntgccttctcttttgacctttgcaagaatagaggccggtgttgaggctgtacttctaaagatccttgcattacgctccccccagatctcccaggtgactagcatcagtagcgttcgcagaggggctcttggggtgctgggggattcgacgacaaggttccaccaatgttcaatcgaggggcagtcattccatttgtccatttggaggtcagtatgtgtccatctttggatttctgcccaaatcctcttagtgactctacatttggccagaaggtgaaccgctgattcgtcgattgtgcggcagagggggcaaaccttttgatttcgctagcctcaatttcccaatctgtcagccgtccatagcctattctgggta

SEQ ID NO: 77851 - DNA, 498 bp, Oryza sativa
  unsure (1)..(498): unsure at all n locations
tcatattggttatagatatataattgacgagcatatatatctatttnttaattacatatataaagctaacacacattaagctgctgattcgtaatttagccacagcaacgagagctagggaacaaaactctgaacagagtgtcaaactagtcatgcatgcaaaagctagagagcaaaaagaaagtcctcaatgccatgagtatgtatattgtcggtgcaccaacatgtgggctcacatgttaatgtcaggcggcaccactcatgcattagcggtgacactttggattaattaagagatatcaataattcatcagaaattagagactatgtatatagttaattctagtcaaaccatgcccaaacaaagaccttctttttagttngaggaaatcgacgtatgtggacaatatacgtcaatattaattaatttaattttacatgtcattggcatgcttgcgtatttgtaattcttgtacacaccttatcagtatggcacta

SEQ ID NO: 77852 - DNA, 431 bp, Oryza sativa
  unsure (1)..(431): unsure at all n locations
agcttgtgcctcatctgatcacccggtcatgtacacttcgccactctgacctcgccggacgcatctgcggtgaagacgacaccgcgcgacctgatggatatcgtcttgacctcgtcgtagcagagaatatcccctctcttcttcagcgacgggagatcgtggacacggacaacgccgtcgccgcgagagacaagaagcacgggcttctcgtcagcgttgtacgttccgtccatggaaacgacccgttcgtgtcgttcgtcttgcatcgttcgcggcacggctgaggaggggcggcgggatgaangtgaaggctctccaccagctccatcgtcgtggttgggagagtggcggatcggcgattgatctcacaagagatggtcatatggggcgttcgcttatatcgggccaactggccaatccgactcagactc

SEQ ID NO: 77853 - DNA, 458 bp, Oryza sativa
agctgatactcgaagcaggaaccacaagctgctccatcatctaattcttggtgtctggaggacagattgcgatccgttgcccgttggtggctgagttgtacgtgttgttggattgaacaacagctggtgcatcatgtcgatgcagctgagcgatttgacaccagacatgccgacgatcagattcagaaatcgccgcgagtggcccaaagtcgactccatcatcggatacatacagactgactgtgactgtgagaggagaatataagaaataggcttaattggttacaacggagaggacaaaatatatttatcaagtcaaaattagttactagtacagagaggagagaatagaatgatgaggatttgttgagaggcaactcatcgagattagatacttgtacttagatctagcattcagagcaacaagtaatacgctagcactctgacaagaagagtcc

SEQ ID NO: 77854 - DNA, 446 bp, Oryza sativa
  unsure (1)..(446): unsure at all n locations
caagctttctcttgtatacctatttgcatcctacgggcttgcacccatatggacgctcaacgacttcccaagtaccattagacattatcgagtccatttcactgcgtactgctttcttccagtagtcagcgtcaggagatgaatatgcctcttctatggttcttggggtgtcatccacgaggtatacaatgtagtcatcttcaaaggatattgcaaccctttgtctcttactcttgcgagtatctacaatgatgccctccttaggatattcctcaagcgtttgatcattgagttctatcagagcaaagcgctcatggagcatgacagtttctttactagatgtgctatgtgtatatttcatatgaaattcattctcaaagagtgtagcatctcgtggactcaagaattgtaccaacatgcatgtcnggtactccagagtttactat

SEQ ID NO: 77855 - DNA, 416 bp, Oryza sativa
  unsure (1)..(416): unsure at all n locations
agctngggcatcgccaattctgctattcgtcctctggcaagtttcactctgttcgcaccctcccaacccgagcgctacaccatcagccatggtagcctcgctcacgcaatcatgcacaaatactagcttgtattaagatcttcaccaaccacatgagtaggagaggaagtaaggttttgcagttctttactttctgcgtggcgatgtccacaaaggggctggccggtgtgggtggaggtctaatagggtggcggcgtggaggtagttggcgttgttgctactgattcaacgacacgaagacaacgacatagaatgcttagaatgctcggagattgatctctctatgacaacaacgacaacggcagagataaaataggatcaccgccccaggagatcagaaccctcctatggatgat

SEQ ID NO: 77856 - DNA, 424 bp, Oryza sativa
  unsure (1)..(424): unsure at all n locations
ctcagctaacacagtgggtcattacaggcattctgaagttcctattctgttgtccatgtaagacagcggcgagcgaagaggcgcatcagtcggcagtatccctacgcgatcttttacactttcaacatggctntgttctttgtcatagctaatatagcattggctggatttgacacttctagatgtctcaggtattgatgaaataatgaggtaagtagctgctgaactatcaacgtgcgtgatttgtggatggagacgctacttatatactcttattgtagaatcgaaggagttatttattattattctatcatgaacaatcggcattgcagagtatgggttctgatacttggaatttatttgccaagtgcgtttggagatgagtggattttacaggtgatctacagatcctgccggatatgtg

SEQ ID NO: 77857 - DNA, 427 bp, Oryza sativa
agcttgattgttaacttctaagacatagcttctgaccctagggtatagcaacgaaaagcaataatcacataatagtcaagttgaattattactaccactaattatgagaataggataactaatgaatctgggcagagctctacaaggtaattgaaagcttgcggctgggcagcaccttcctgtctagcctacctatgcaggcagcctatggccttggtaaacactatattgaggttccagacccatggtaatttaaataatagaccttaggcattgacagctaaaatgttggcatttgttcaattaaataggttgaaattggtacctgatcatataatgatctcttctgatcatccttcaaagtcttgcaagaaggaaaaatatgtatgtctcagtatattatcagaaactaataataacctttacc

SEQ ID NO: 77858 - DNA, 327 bp, Oryza sativa
tcgcctgagctctgatgtgcgtcaagccacgccggatctatgagaagagagagaagggaggggagcggataagttagcagatctggaccgagccacctcttcctgcactacaccataggccacgccaagaccctccactatttccttcgccgccgtctacgtctagccaagagggagatgcgattgccaccgccgagccgtgctcctgtcccctctcctctcttcaccgtgctgcgcttgttccgagccgccatacctgcccttctactgtcctctgccgcactggcaacaccctttgctccttggctgaaagtgatggatggagag

SEQ ID NO: 77859 - DNA, 426 bp, Oryza sativa
agcttcagatgatagacatatcaagacaaaaccctcacaaaaggggcagtttcttaaggaatcttacacctctccaccagtttctcttagaagctagctatttaaagaaattaaacctgctgaaatctcagccagggcctacagcttgtccaggaaattgtgacaaaaacagcttatttggaagagctatgctggaaggaatccagcagctctaagtttaagctcaatgactctaaaaaggcctctaaaatagctgcacaccctggtttcaaaaatattgggaagcaaaagaattctctatacctccacaaccattgctttgatcagaaattaactttaagagatagggaagtaactcaggccagtcttcaggccaatcttgctggccaatagctgctacagccatgccaatagcagtacgaatct

SEQ ID NO: 77860 - DNA, 352 bp, Oryza sativa
  unsure (1)..(352): unsure at all n locations
ccgtccttgagaacctcgaagaagaaagtgtgtgtcctgtgcggcgctccactcgtgtatggcgtacggagcacgcggcctcggctgctgctgctgtgatggcggcggcgccgccgcctacgccatctcaatatccctggagcccctacctaagttccccgccgcctcatccgcctcggaatcgctagcgctagtgcccccttcggtcgacgcgttcgccccctccacctccggctgcagcggcgccgctggccgtggcggcggaggcggaggcatanaggagctagtgctcgcaccctccaccgggagtggaggcggaagcggctgcatggaagagtaaggttaatggatt

SEQ ID NO: 77861 - DNA, 425 bp, Oryza sativa
agctctatatcttttatattttgtgcccgaagcgatagccgtgcaagtccaaaactgcatttcgcttcgtcctcttcacgcataatctaatcagcattaccacagaggaaactaactaatacgccaaccattgccatgcatcgtccttttgaaaagcgtcacaacctcacagggaggatcaagcattcgtcatcatctctataggcattaaccattttttctcttctcttgtttaccttattcatgtacagactagtacagagcaagccatggctcccttccaagattttgtacaggagacaggccgcataacacgaggttgagggggcaaaaaaaaaaattatatttctgaggttgcgccttggtagagggggttgccatggcccgtatcctcttgcaacctccgtgaagctcggtctttctga

SEQ ID NO: 77862 - DNA, 438 bp, Oryza sativa
  unsure (1)..(438): unsure at all n locations
agcttgcaagttgtgctttctggacttgnggataggacaccacgacttggttagctcggaagttgtcctcgtcggctcgcagtccttgtcagaaggacaaggctcggccgcactaggaatcttctcgagcttgtacgacgtcgatgttccgttctctgccacggcgggaggattcttcgactctggatcgtccgagtttataatcacggcattctcgtctctaagtattgatggaccaaccgagattggcaccgtggtgtagaccgggaagacgatttctccgacttgagtccacaccagcattgttgaagcaaggattccttggatggggccgatgttgactctgttgtcgacgaagctcgatgtcatagcactagaaccttgagcaccaatgccccctacctggtgcgccactgtagacggtgggtacccgtagac

SEQ ID NO: 77863 - DNA, 243 bp, Oryza sativa
ttcctcttatacttctctatcctctgccgcaatagatggagcaaaccgatgagtatcctatccgaatcgagctcgtattcgagtttatctccaaaaccgagtttttgatttcccggatcgagttcttgcgagaagagttcgatctcttcaattcacagctatatataagaccccctattcctcctctttcgtttgcccactctctcgtggactcccgtgcctcgtagcagcgccgacacgtgc

SEQ ID NO: 77864 - DNA, 413 bp, Oryza sativa
  unsure (1)..(413): unsure at all n locations
agcttctcagtttctcttattgatggtggcagngcactcaatatcctcttcgccaagactttggatgatatgcagatccctcgctccgagttaaaaccaagcaatgcgccttttcatggagtaattccaggattatccgcaactccactcggccagatcactctcccggtcactattggcactcgggaaaacttccgcacagagaatatcagctttgatagtgccgatttcgagacagcataccatgccatactcggacgcccggcgttagccaagttcatggccgtcccgcactacacatacatgatgatgaagatgcctggtccccgaggagtcctaaccctacggagcgacatcaagcaagctgtcacatgcgacaaggagagttgcgacatggcccaaacccgcgagat

SEQ ID NO: 77865 - DNA, 452 bp, Oryza sativa
  unsure (1)..(452): unsure at all n locations
actatanatactcagcttagaaagatcaatntaagcatataggcattctgagatttattttcttgcaaacattggagcttcgctgtgttgacacttctagtggataacacatgggcccatttgtgtctatgaaatgtgggtccagtgtcattttagataagattatgggacgattttgatgaccagctgaggggccttcggtgtactttttccgcacacaatataactctgttcaagcccaaccgtacgacaaccgcgctcgataccctctcctcactccttcttggcggcgaggcgtcttcgacgataaccctagcacgcatctcttaccctctttcccatggtgagtattcacaaccaagaccttcccgtttcgatccgctctgatagttgcttcgtcagctctggtccagatccatctgaccgatcctgtgatccagcttgttctgcct

SEQ ID NO: 77866 - DNA, 314 bp, Oryza sativa
attctctaatttacagaagctctgcatcctccttgacatgcgagcacttacattaagtccatcagtgacggcacgcccaatcatacctatcatgattgaacctcacttagataaggctaaatgtataccgactttatgatgcaggactttactcagtgcttatgtactatgattggtcaagacatatacataatgctctcgaacagttcatgtgacaccagaagagacatacttggttcaatggcgccacgacggaagcatactagtatctgcatgcattaagcgaggacgaacgtccatagctatggcattca

SEQ ID NO: 77867 - DNA, 396 bp, Oryza sativa
ggggactttgtcgaagttcgtggcttgaacgatatgttctatatatcaattctcaagcccacttcgcaatcctgtcatatgctttgggatcgtgaagtatatctccaagtgggaaccatgtgaccaccgtgaccgagtgactctgaaagtagtgagataattttctgacggtaattaagacaccatataataacttttgaacctgaggatatcttgtcttggagtcggcttaaacttcgctaacgaaagtaattggacgttggacttttttaataaggccttccttttcaagctcgacaaccatgaccgtactcacaacctgtgaggtcgccgacatatataacagtagctgctcttgtggatgtgggaggccgaaactggtggagtggtgagaag

SEQ ID NO: 77868 - DNA, 370 bp, Oryza sativa
  unsure (1)..(370): unsure at all n locations
caagctttntatttctgttgctatgtgaatttcaaagagttgcaattcttgttgcacgcatatattttacaaagcagtcggatatcacttggatcgtgttattcggggattcacaccgcatatgctatatattaagatcaagtcacttggttgactataattatcaaaagctactcacgtgggtggattatttactccatgactatatngtttagttgctcaactaaccacatagtcgggggctaaacctattaggtgcatcgatgcacctaagtttacattatgttatttttcagctctccacagtcttcagatttggtaaaagtactcgggagaccatggcgaagatgattgaagcactccgctttgg

SEQ ID NO: 77869 - DNA, 479 bp, Oryza sativa
  unsure (1)..(479): unsure at all n locations
tctggctntcgatgccctcaaggaaagcagtggctgactttcttcaagaggtcacttccaagaaagaccagcaacaatattggttccttgacaaggagccttattgttatgtgtcagtcccagagtttgcagaacgtttcaagtcattttatattggccaacaaatgatgaatgagcaacatattccatttgaaaaatcaaaaatccatcctgctgcactgacaacaatgaaaaatgcattatccaactgggagtcattgaaggctgtgctttgtagagagaagttgttgatgaaacgcaactcttttctttacatattcaaggtcacccaattgatcattcttgctttcttgtctatgaccgtgtgtcttagaaccaaagatgccccattggcaattttctgatggcactannattcttggnggcattgcattcatattaataacagtcatgttcaatggccttctgagctaaacttg

SEQ ID NO: 77870 - DNA, 387 bp, Oryza sativa
tagcttaacagattatttacagaggcaaggatccccaaaccttgagcagcacagtgtcgccgcggaaaagctggagcttctccatggtgtcggggtgcatcccgatgacggagttatcatcgttggtggcctcgtcgaccaccagccggttcggcgacttcttcctctcgaggatcgccgtcgagaaatccttctttccctttctgctcacaacaccaccaccaccccacgaacattataatcacccaaaaaaatcgcataataatcgcaaaaattcgataatctaccagatcgaaaaggctagatcaggaaggggggaaacttacggatcggaggaggaggagggctctccctggctcgccatgggagtcggcggattcgcggatt

SEQ ID NO: 77871 - DNA, 405 bp, Oryza sativa
  unsure (1)..(405): unsure at all n locations
acgcgttcgtccacgtcgcgaaagcgaaccccgacgcccggagcttcggcgacgactccagcaccgagcacttcacccctttcctgcacgcggagcagatcatcatctcgagttaacctgcggcagccaacacacagagcaatacgcatcaccggctcaccggtggctcctctcacctgtgcagcccgagagccacggcgaggccggcgatcccggcgcccacgacgacgacgagcttctcgccggcttccttttgttgcatgcttgatcgatgctagattctcagtagtcagtactccncctgagtactcttaatcaattgggaggccagtgttaattaagaccaacactaactgagaaagcttctttgctcactgaatctagtgctgctcgtggccgcatata

SEQ ID NO: 77872 - DNA, 405 bp, Oryza sativa
tagcttgtgcctctgttgcaaagcactaccgtactttcacatgtctaatgggtaaagcttagtctgtggctcagtctagtcataaacaaaagtacacggattggagatggatgaagtctggtgtcgatggacattctccatggcaaatgaaagctacacgagctgcggcccggtagtcgagatgtcatattgcatatggttggcgccctgcttgctagggctcagttctgcctacctgtcccgggtatcccggccgtaagtgggattgggtcggtactcttgtctatggctaggatgggttggaaactatgtcacgtctttcgtccgtataccgtggtggtatgtggcacgttgtcacacgtgaagaagatgtgtcttgtgggtaaagatgtcacctttgatcat

SEQ ID NO: 77873 - DNA, 375 bp, Oryza sativa
tgcctcgagtgtgctaatggcgtgccatcttgtttatatttctaccatcatggtaacaacaatgcaagttgtcgataactgatcctctgatatgcctatgactatcactatgaactaactgaatatttggaccgatcggctgttgattgatgtatgaattctagcataaacacctataaattgtctcattcggcttgtatgtatcatcataatgaattctgcaatgtatgagttcggacgagtactattatgtagtagtctgtggaaacattgtttagaacacgatatactgatatagataatataccatcttatactctagctcaaacttatatagacatatcaatctatatatacatatcagatcttgatcag

SEQ ID NO: 77874 - DNA, 405 bp, Oryza sativa
agcatcatcccttatatgtatcgttatcaacttccttcaaaaatgctatatatatgtacgggcgtattaaattatagcatattatgcttctatagatatgagaatggaagaagtgaaaggaagatggctatcccatttggcatggggaggtgcaaatgccctgcacaaaacatgtgcatgcaaatgggatggcttgccctcgagacattgattaatgccttgaatgggacagaattggagaggaacatgacacatgaccagggatctggtctaccatgcccactaggggcctcgcaagcctctatcacctcgtgcgcaatgatgcatctgcttattagcctaagagacactacattgcagtcttaactggaagccgttcatcaggtccgacttgcaaggagatga

SEQ ID NO: 77875 - DNA, 409 bp, Oryza sativa
agcttggcttctatttatactacttattaggccgataactccccaccactcgtcaagggccagaagcgtgaactcgggaaggtcggtgaattggcgcccgagccacaaaggggcatagctgcgacgtccattcctgtgagcatatctgggaaagtcgtgaaggcgtccgtcaaatttagctaagcatgccattggtggatgacaatgagctagcccagatgggtattgcttgccgagagctacataatctatacatggagctaagcaatgccaatcggaatatgagggagttatccatatttggacatcacgaccaccagccgttcctattgtcgcttgctatataactatacgctttgattactttttcgatttttaaggatcacaaggtgacactagactcctaaat

SEQ ID NO: 77876 - DNA, 420 bp, Oryza sativa
  unsure (1)..(420): unsure at all n locations
agcttgtaagtattttgctctctaccttgcacaataattgatcaacaactttttaatctctttccatttgaataaacacccaacttatcatgcaggaagcttattttggagttgttaaggaaaagcatggtgcaagtcctgatttgatgaaataacccattgatggtaaggcttggcaacatgaaacatgttacttaacatctgcgatacagctggtaacttgtagttttgcctcctttatgtacttattaattttaaaattcatcaacatgtataaatntaactatttgcattgttatgtgtaaataaatttcaggcgcttcaatctgcaatgaaacttaatgttttgccttcacgaccagcgggcccaacatgccccactgtctatttaggtgagcaatcttataccaacattaatga

SEQ ID NO: 77877 - DNA, 377 bp, Oryza sativa
  unsure (1)..(377): unsure at all n locations
tgaatcagagcacctcgntctgataccaattgaacgcgcagatatattgtctagaggggggtgaatatgcgtgtctgaaattttctcgacaatcgcagcggttattatacagggcccggaacctcctggtgaataacaccggaacttctggcagtgatgagcaacccggaacttcctgagttcttgagccagaaacttccggggaacagagaaaatcgaaatctggagaaggcaaacaggttctatccagagatgatcagccacagagttgcacaagatgtaaatcacaagataccagctgattcaaacacagaacatgcacaagagagactaatgcgatattttcccgaaggtcggatcacacggatcctactctc

SEQ ID NO: 77878 - DNA, 408 bp, Oryza sativa
  unsure (1)..(408): unsure at all n locations
agcttgacggatgctcttctgctgctctgattgaaaatcgcaaaagggtgctccaaattaaccacacaaggtactaccaaaatcccctctggcatgaatccactgttagaattcatcaaactttttttcttatttttatgatatatggacaaaaatggatataggtgatgaactaatcttcaccactactttttctttttgcttcccaatggttgttttgcatctcttctcgtagttgaaagactccatgagtgaaaagaatttaaatttgagttttaaaatttgtaacttgactatatgtggggaaatttgttttgggtaggattagagggaatggattcatatatttttgttacaaacaattggtcaactatataaatcaaaatgtttganactttacaacgctgt

SEQ ID NO: 77879 - DNA, 476 bp, Oryza sativa
  unsure (1)..(476): unsure at all n locations
cctatanaaactcagctctatgattgtatattaccttctgccatgcatgcatatgacaggtcttttggtggnggcatgtacttcatcaaattccgccgtatattctgatcaagaaagagagaacaaaancattttagtttaattattctgtaagaaaaaacatgcagttcgggctaaaatagtttttatattataaagcagtacataccaaagctattatgagaaatcaaagagatacttcattcaccctgtgtatgagcgcagaaacactaatcctcgtttcatataatttagtttgtcttggtcgtgagcgatgattgatgagcaattatctatgagcatatctgtgtcataacagaagatataagcaaataaatagagataacatttgcagctgtcagctgtgataaagtaaaaagatgatcccagggcacatgatcaacgaattgatttatgagttatgacagatcttctta

SEQ ID NO: 77880 - DNA, 416 bp, Oryza sativa
  unsure (1)..(416): unsure at all n locations
agcttattatatatataagaaagctactagagccatacccgaactctttcgaaggcttccggactcctgatttctattctaattctattccaccagctagatactactaaactaaacttgagaggaatgatagagctcttgcttgaggtgtgtgttgaagtgaagagagtaagctctttatatagaggtaggtatgacggttatggaaggggaattgtccgaagtaccctccaaccgtcattggggtgaaatcttggacgtncatgccaaaccctggcctcaacggtggagatgggggttgtgaaaatcncantgcgtaatatacccatttaattcatggtgtgtcatgcatccacgaactgtatatagccgtgtcatgtgccaccgccgaatattttataacgtttttcatatta

SEQ ID NO: 77881 - DNA, 473 bp, Oryza sativa
  unsure (1)..(473): unsure at all n locations
actatanaaactcaagctactctggacaaanatcatcantgcgggtttcttgtattgttactgatgatggaggcactgatgagctgttctgtgggagtaccttactctattgctaacacttagtacaagtccaaattttaaactgtaaccgattacgcatatatttaacacaaactctaacaggtattgttaaaacgtacttccttagtgtctcacagaaaccattcgaaattaatgcagccctctcatgcatgcatacgttgaaagaccacaaaacctattcgaagctatcgatatttgatntgatggacgaatatattttactatattttccgaccaaagaatccatgctcgatcgattcttggacgtgtccatgcctccttccttgtctgagcgaaattattagaataaataacacacatgagatattcactgtttctccgaccaaacaatccatgaatgttgatcatat

SEQ ID NO: 77882 - DNA, 330 bp, Oryza sativa
  unsure (1)..(330): unsure at all n locations
agcttgatggtctctctttatttcagacgggaagaagactgacgccctaacgctccgtcctaagccgtctggaactatggtccttgcaaacgntgggttgtgcaggatcacgtgactgatacagctgcgtactggctaagaactccggcacgctgtgtacatcacagctttgccccagactcagagatagagatgctgcggaccacaatgcctcggacagtcacccttactgcgggttcacaggattatgtgaataggtggactctgtacatgatggcctagcgtgtccttatcttcaatggagatctcgtcctgaagtatatactgaag

SEQ ID NO: 77883 - DNA, 457 bp, Oryza sativa
  unsure (1)..(457): unsure at all n locations
caagcttctctctctattcacaatactgggcatcagtntnngtctcactgagatcaccaacatattctnaccgcgtgtcacatggcttcatctcgtgagggttgatatattgtgttttcgctcttttaatttattctcacctaatgttatagattgcgtctgtaaattaacctcaactgtgtggagttttctacgttttcttgaacacattttcacattatgaaacacggagtgttgacatattaccgtagctctcacaggacccaaatagggtccctgtctttatccccatgcaatagttcctgctaagaagtactctggaaatgagtacacattatcatacttaaaatcctctccagctgaacaatagccagttgcagtttcctctgtgcaggtggtatgtatcggttctttcttagtagctaacatcttaaactacaatatgagtggtattctg

SEQ ID NO: 77884 - DNA, 429 bp, Oryza sativa
  unsure (1)..(429): unsure at all n locations
gtgattcctatccaatntcgcagtagatgttgtgaagtcttgattcttatcgaatttcatctccctgaatcaatcagtagataaaaagaacactttacacggataacttgtcttaaggaaataatataaattcaggcagagccttctctatagcaagattcattctttgtgagaggaacaaaatataaagcaaaaaaaatggcctattgtagccaaactancaagattgggtcatgaatcaggacagttctcttagctaaatagaggtggaagaaaggtaaggcgggagctttgctctttacaatatcagagagtttgggtaaaattccatctgagaatctactatactgggaaacactgataaagaggacaaatgctctgtgtatatacactatatttaacanagaaagcagtctcttttcatattac

SEQ ID NO: 77885 - DNA, 367 bp, Oryza sativa
  unsure (1)..(367): unsure at all n locations
agcttcttcttgaacacccacttgtaccccacaggtttacacccatagggtcgctctatcacctcccaagtcccgttagcgataatggaatccatttcactacggacagcctccttccagtagtctgcatcaggagatgcatatgcttctgaaattgacttatgagtgtcatccacgaggtacacagtgaaatcatcaccaaaagacttagccgtcctttgtctttactccttcaggagcttactgacatcctntcagagaaagttcatgtgtatgtcagtttgtctggtgggtgattgaactggaatatttagagggtggtcgaaccactatggtatcttattggaaaaagcctcaagaagtacat

SEQ ID NO: 77886 - DNA, 435 bp, Oryza sativa
  unsure (1)..(435): unsure at all n locations
tctatggtatcagcttgcatcacctacacccacantccatagatcacatctccaatttcgtccatgtttgtgaaaccttcttgggaattaagccccacttcgctctgtttcgccgaatcttctttctcaagccccaaccaaacaatagtaagccatgtgtagtccgaggggccggatttcatctgagggggactctgagccanaagtacttctctatgcccttcaagacctcaaacaaagggtggctgcaactggtttatattcaaaatcctgagcctgctcttcccgagtactctcgtcttcctccggtgtaccaagatgcctggaactctctttcgattggggatgaagcagcccaagccttggagctgatggatcgcatgctataactcaaagaacaaggcttacaacgagagcagattactcgacacttca

SEQ ID NO: 77887 - DNA, 371 bp, Oryza sativa
  unsure (1)..(371): unsure at all n locations
agcattgattattctgaacaaccaccaatgacatcgaaaaaattaaaacaaaattgaggatcaattttatttaacagtcgagctctgttcctccagccgcattgaataaccaaaatactactagtagtaaaatcattttgagcatccacacctaatcaataaacgagtgcaccaaccaaagaacagncgcactcaccttgaaaacaacgcgnggggtggctaaaaatcgcaatttcgcatatggctcctcccaagatccgattttgacgccgatttgatcacagaaatcccaaaaaaaaaaaaaaacaggagatagatgggaggaggagaggaagaaatcaataaatcaatcaattaatcaataagtcgat

SEQ ID NO: 77888 - DNA, 356 bp, Oryza sativa
  unsure (1)..(356): unsure at all n locations
tgtagcattcttaagatagattcgatctcttcagatgacatgtacttagatctgaattntattcctccactatcaccattttgattaccagtatcaggcaatggttgagaaaaacgtatgttgtgttttcctcttcctgaccttgatctcttgtctcttgatgaaagaacactgctaacagaatcaaatctttctgttaattctggngagtgatgttggtaaaatatgtgaggtggtgaaattaagtaattctgatgggatggttggacttgaacttgtgccaatctctgctgctgttgagaaaataacagtgatgacatcgggctatttggaagtgatatatgtttctgtaacat

SEQ ID NO: 77889 - DNA, 374 bp, Oryza sativa
  unsure (1)..(374): unsure at all n locations
agcttgccgnttttcttgggaacgaccaccgggttcgccagccactccggatggatgacctcgcggatgaatccggcctccagaagtcgcgccacctcctcgcggatgaaggcttgacgttccgggacctgccgccgtactttctgccggaccggccttgcgcccgaccgcatggcgagacggtgctcaatcacctccctggggaccccgggcatatccgccggtctccatgcaaagacgtcaagcgttgcccgcaggaaagagacgagcgcgtcttcctatttgccgtccagaagaccaccgatccgtgtggtcttggacgggccgtcgtcccaggcaacatccttgaccgggacctcgtcgcatgtgactat

SEQ ID NO: 77890 - DNA, 385 bp, Oryza sativa
actcagcttgccacttgtccgatctgggaagaagggtggttgtggctttgttttcatggaacgaccgcctccccaccgaggttgccgctgccggccgctgtcgcggcgccgccctcctttaccgccttcttctacgtgccttcgcttcgccggccgccgcgcgctcgcgagttgcctccgctggccgccgcccgttccttgctactcacccgcggcaaagggaagagaaataagaaaggggaaagagagagggtgacgtggacacctgacatgatgggcccacgtgggtcccacgctgtcggtgacatgggaccgggagtatcatgacttagagacttgaggcagacacgatcacccacgtggcctaaccccctcgggggggggg

SEQ ID NO: 77891 - DNA, 411 bp, Oryza sativa
  unsure (1)..(411): unsure at all n locations
agcttatagaactctcttggaggtatatatctctgaattccaaataaaacaccaattgtcaccctgtgcatcattcaaattcagaggattcaagaagtcctaaagttgcaaaaaatccccataaacctgngtagaaagaggcatcatgaaacaatcctccaaagtcctagatcacattcagctaattgattcctccttatataaagctagagcatgcagagcacgaaatttggagctatgcagttccttattccacaagtcatcccaaaaaagataagatttctcagactggatggagacatttgcaatacctctgaacaaagctgagagggcctagatgtctcttaaccaaaaggaacccttattaaaaaccaaatgaggtacctntacagagaagtaataattccatac

SEQ ID NO: 77892 - DNA, 444 bp, Oryza sativa
  unsure (1)..(444): unsure at all n locations
tatcatatcactggcgtttgcatacgtcatttatagacgtattttatgcctgaatgacagatggtatatcactggcgaacaatcatttagatatatgtatgccattttgagatgcagtagtatcatttatggatgcataattaattcgaaaaagaaactctgaatgatataacttgttggatggagatatctcagagatgcatatcattttgtaaatgtcattatggactatgtgaatgaagacacaatattttgcgataaatgtcaatgatattagaccatatgctccccccggatgctctcgctgatgaaatgagaaagatatatttgatcatctctattctcatgtaatcagcacccncgtggaatcaatgcatactttgaaaatatctctccagttcaatctctacgcacacgtaggggattgcacanaaattacacata

SEQ ID NO: 77893 - DNA, 438 bp, Oryza sativa
  unsure (1)..(438): unsure at all n locations
agcttncttgtatctatttcctctgttgagaatagagnacttttctgggactgtaatattggagaatgatatcaggctccaaattattttatccatctcggaacgctgattatttctagaaacattttgtaggttaggcatagagttactatccacctcctcaaatgtagtgtttccttcgtaccggcttgattgcaaaataaaagtgtatccttcaacagctcttgccttttccagttgtggtgtagatagaacatgaccatcttctgaaactaccctgtttccactgatgctgtacatgttaatgctacctttttcctttaccaccatcagaatattatctgtccaccaactgatgtccttaacatcactcagttgtgtaccattcctgcgaggatgaagtgaagcagagcgtttgtcattagcaagtacacagat

SEQ ID NO: 77894 - DNA, 436 bp, Oryza sativa
tatataaatttgaagacttcaaatggtgagcaacttcatcctactctttggtctgcttaccatctacatttggagctactttttttacatatttttccctctataaaatgtgatggaagatgatgagagagaaagtgtgtgtaaggaataaagaagaatatctatacttcgttgaataattacatatactcttggatgaaattatcaaacctaagctaatttaatattaaaataagacaaacatattaaatatctgtttataatgtaagtaaaacatgaaacatatgtacaatgaatttaataataatgattaaatgtatgaattattaattcaattattgtattattatgtgattaccttgtaaatgcttgattatgtataattacgaattatatggatttcatatagatggatcgcgcatggatgtacgccgat

SEQ ID NO: 77895 - DNA, 498 bp, Oryza sativa
  unsure (1)..(498): unsure at all n locations
taactgtatgtttcaaatatctcaaaatcctcttagcccgcgcttaattgcttattggtggtgcatgcaaatactggcacaccttatttactgagaatgattaatctggtctagtcatagtcaaatactgcaatgctccaaccaaacttctgtacctggtactgtcttctggtccaagaggattaccttcatgagcacttaattnttctgaaatatactatagagtattgactgctttacagtcactcatattcactctctgtaacacattcatagcatatttctcttgtgtcaaaactatgccattatttagttctttcacttcaatgcctaggaagtaatgcagtcttcctagatccttgagtgcaaattcttgattaagattcttaagcaaagcattagtggcatcaatagatgagctggtactattatgcatccacatataccacataatatagtacatctccttactgtaaagaccaagatgttctgacttaa

SEQ ID NO: 77896 - DNA, 437 bp, Oryza sativa
ctctaacagcgacctgcatgcatgctagcctgatgctttcatatatttttatacactagaacaccgcgtcttatcacccatccgatttctatttcagtccatttgataattacctaaatttgcactatgtattctttggactttcactagacaccatactcataactcacaatataaaaaacaccactcttttacgaagtgccgacttgagattctttattttctaacatcaatctataagcatttgttacccttacgtaaatcataattttcagtttcatactagctcgaatttacaccaactcatacatctgtattgaactttattggttgtcttgagaggaaactaacttctatgttagaacaccgtttgcttcccacaacaaaagaaacgttattgtgaaagtatcgtattgatctggcgttaaaatgtgatt

SEQ ID NO: 77897 - DNA, 414 bp, Oryza sativa
agcttgtaaggtctttgtttccacatcaagcaaatagcttcgctcccaccaatcgccatctagcttgcatcaattctgtgtggcgagcgactcaatctgtgtatccttgggctcctaccgttgacaatctaatgtcctctttaaaagaaagggcatgacatccagagcaatatgttcatttgttctcatccgatgtctgtgaaatctgtaagatgatccaactcctcaatgccagaaaggacatcagagtcatactggtacggaacaaactctggttcagcctcttgaggaagattatcaaagtaggtgaattcagaatcactgatgccaaggtcagatagggactgggtaatgtggaactctgctgaggtatgcagaagttgccccggaatcctatgaaaattatttgtaacc

SEQ ID NO: 77898 - DNA, 413 bp, Oryza sativa
aacggcgaatcagctcgacccgcgatcttatatcacctgacgcatgcaactttttatatggtggtgcaccgcggagattggtcccttgctactgagcacaagcgacatgagcagatcggaacctcgccgcgagctcaagcccaacgccttgcttctgagccatagctatggaccgaggaagctagcttcatgggactcccttgagtcagcacaagcacgcgcgagtagattgcgacctcgcggcggctcgacaccacacgtgcttgctctgatctgaagacagacagtgattggctttgaactagcagacttgcttgacctgactctttgggattgcttgaattgtctttggacagatcaaatgaatttgtactaacacatgcaaatatttaagcttgagaaggaaataaatt

SEQ ID NO: 77899 - DNA, 499 bp, Oryza sativa
  unsure (1)..(499): unsure at all n locations
tactcactgtaatcacatactccgctatttgatcttttattgtactacaatgtgtccatctactcaagtgctgggaagtaattcaaggatggatgtcngtatttgtggtaattattgcggcgctatttatgcctcattatcaatttgtagaatctattataattaattgagatgatattgactgtatgcatgcgtgttgggacaaaataatactcaccgtcccaccagctatggtgtatgaatcgaattgttctgtctgcagctttcagatctatgtgcaaaatgttatatgaaagatctgtctacacgtctcgtatccataatgtgtaaggatcaccacttatttattttttgactgaatggatcaccatttattctgcagntatggcacgcaagcaatatgagaagtacccataaaatcatcactcaatctacgaaatcgagttattgaaagtctaatcgcacagcacatcatgagcttctgatgctcatgtgctat

SEQ ID NO: 77900 - DNA, 422 bp, Oryza sativa
  unsure (1)..(422): unsure at all n locations
agcttgtatcttctatcattattcgtgatttcatacgatttataatgcaacatcttaacaagcacatacgttgaagaataaacacgaaacacatatacctattgcatttatcactctttctcaaataacctctagcacaaaataaccaagagaattttttaactttttcttttcttgagccattttgctcatattttttcttttttattccgggtatgtgcctatcgtcaagactgtttccagggattcggcacccattattntgctcacatcgaatacgtccttgtcgacaagactgtttccaaggattcggtattcattntttcatattgttattctcttttttacaatgaacaattaaagctatttgaggaataacaagtcaataaagcatatatatagagcatttataaatcatacca

SEQ ID NO: 77901 - DNA, 480 bp, Oryza sativa
  unsure (1)..(480): unsure at all n locations
actatananactcaagcttctttaatgggccaatgggtgtctattctcatanatgatagtcttgataggctcaacatatatcttacatgtagagatccaatggtgtattttcttttgctagatgcatccaacagttctactattctggatgatgttgctcatcctccatccagaaagcttgttgctttcacctattaagattgtaggatccaataaaataaccaacactaccatagggggggtgaatggtaagtaccgaaacacaaatctttttacagaactaaaagattaccctctaaccagatgaagaccttggcgtagccggtctgacagcttacacaccggtctgagcgagcagtgttgtccggtcaatataacatccgccttcctgtctgcttgctattgctcgccgctgccgatctaactgctngcaaatctcgaagcacaccgtaacttatttctccctcatctatttatacc

SEQ ID NO: 77902 - DNA, 370 bp, Oryza sativa
agcatgtttacttttgctgggtcgtccttgggaacatgataatgatgctacacaccatgataggagtaataaatacacttttgtgcataatgaaaagaaaattacttttctaccttttacccctgctgaaattgtagaagctgataaagagcgagctgctagtttgaaacttgatgagtctgaaaatcagcaagtggctaaatctgtttttcaacccaaaaggataagctttcacctacttctaaggttgagggaactaagttgaagggtggtgttatgctcgctacgaaatgtgacattgctgtcatttcagataatgatatgtgctatttcttgatatgcaaataagccttggcttctctagatgata

SEQ ID NO: 77903 - DNA, 419 bp, Oryza sativa
  unsure (1)..(419): unsure at all n locations
ctatttgacacaccaaacacaaacgaagaccacagtgacgctttttatgactcacttgcgtggaagaccaaagagccaactctattttatattatattattttatccatgaaagctatacctattataactagagggaggcctaatgactcatggcattgataactaacggatcaaggtggacctatagactccgggttgaagctttaagagactagattcaccacatttaatttacgatcaacttctaacagatcaaggataactttatacgatggccatttaccttaaagatgttaccttcgttgttgcacagtgtaactgctccatgtgatgaaacgtctatgacagtacatggacccattcatttaacttgaaagtttccatgtccgaaaagcnttactcctgagttgaactgca

SEQ ID NO: 77904 - DNA, 402 bp, Oryza sativa
agcttccatgcctccttcctattgggccgaggctctagctactgccacatacctactcaaccggagaccttccacttctgttcgcaactctatcccattccaactcctgcataacaagcttcctgactattccaaccttcgagtcttcggttgcctttgttatcccaatcttagtgccacgacacctcacaagctctccccttgttcaacagcttgtgtctttcttggctacccggcctctcacaagggttttcgatgcttggacatctctactcgtcatctctatatttcccgccatgtggtttttgatgagcagacatttccctttgcggccgttccccaggatgcctcgtcttttgattttcttctacagggtttctccaccgcggtagctccctcctt

SEQ ID NO: 77905 - DNA, 431 bp, Oryza sativa
  unsure (1)..(431): unsure at all n locations
agcttatctttattctcttatgcatctctcaaaagaaaacgcctatcattcctccaggtgaaattcaagctagcttcttcttgttaaagaaacgtcaacagctcattccacatgtcagaaggctacaaaaggacatatacagagaaatagggatccccaatactacggtatgccattattccactttgacaaaagaatatgtcttgcactcaagctatactgaaatgatcgctcgaaaatttgcaggtntcggtttctatgcatacatccaaatataaggattccacttatgtaaaatttggtattctaccgaacccaagaaattcctccataagtgcacaatccattattgccctgagaaaaaacttgatacaacttacgcttgagcagtcgaatntatctttgacatcatctgtctttggagatccaca

SEQ ID NO: 77906 - DNA, 276 bp, Oryza sativa
  unsure (1)..(276): unsure at all n locations
agcttgctcacttaccgatcaaagtgggtggaattgatttgtgaatgcctaaaatggcctatacttacgtgaggacttgatccttctatgtggcatgaggtaaccctgggttggcttggaaagggtttgtcgcgaacctctgacaccggccagtgtctggagtaaattcgtgtcttgtgggtaaagtgtacccctctgcagaagttaactaactgntcgaacagccgtgcccaccgtcatgggcggatgtgaggtggttcccgttgcgtagatatg

SEQ ID NO: 77907 - DNA, 428 bp, Oryza sativa
tgactattacctaatgaaagatatgtaatggtatcttaccatggctagtcgtgattggtcattaattaatttgccactaaaacctgattatggtgggttgtgagcacatggtcttgatggttcgtgagctaatgttgtgaaacattatccgtaccaaccacaaactagcatgggcaatggctttatgttttgtatagcatggttcattgcggggcactagactgtgaagcggcgataaatccgtggggtcgactggtgagtctataccttggttataggggttgattatgatccatgaactgtgcactgctgtgaattgtgttatgcagagggtactgtctcactctcgtttctaggtaccgtggtggtactgacggcatggtaacatgttattgtgctctgtcttgtggtacagtggtacatctctt

SEQ ID NO: 77908 - DNA, 384 bp, Oryza sativa
  unsure (1)..(384): unsure at all n locations
agcttgcccgcatgcatctccaacacgcacttgtcggngttcagctntatgcgggcggtgcggagactttcgaaagtttccgctagatccgagagtaaggtctcctggttgcgtgttttcacaaccaagtcatcaacataggcctcaacattacgtcctatttggctacccaaagaaattcgagtagtacgttgaaaagtaggacctgcattctttaacccgaaaggcattgtcgtataacaataagttcctatggnggtaatgaatgcagattttttctcatcctccctagccattcgaatctgatgataaccagagtatgcatctagaaaacacaaaaggtcgcaccccgcggtggagtcgacaatctaatctattcgtggc

SEQ ID NO: 77909 - DNA, 356 bp, Oryza sativa
ggtctgggtcatggccgtctggcctgtcttggacaggccaaaatcagagaccttggcgacccacttctcgtcgacgaggatattggtcgtcttgacgtcacgatggatgatggtgtacttggcaccggtgtgaaagtagtgaagtccacgagcggcgccaattgtgatctcgagccgttgcttccatgacagagccggcttaccacccttgtacaagtgctcacggagcgtgccgtgcgccatgtagtcatacacgaggatcatctcgccctcgtcctcgcagcagccgatgagcgagacaaggtgcttgtgtcgcagcttggacagcatctcgatctcagtctggaactccagca

SEQ ID NO: 77910 - DNA, 356 bp, Oryza sativa
  unsure (1)..(356): unsure at all n locations
aactcttactatacaagcatcacanatattcagcacgatctcttccacttcatccaccgtgagtattgtcctgtggaatgaaagatcttctacccagaaggtgccctatctacaagtgatgaatacaaaaatctttcggagtgtagcaatgctattccataatgtaattagataacgtatttcaagtgacaatatgtaaaaaatattgtaatattttgatgacacttttcacttatgcaatatatgtaaatttctcaccatcaaaagcttgttttttactaatattatttatgcatcaattataattaaataattgaaaaataatttatgaacaaattattattgtatcaaatttc

SEQ ID NO: 77911 - DNA, 479 bp, Oryza sativa
  unsure (1)..(479): unsure at all n locations
catagaaactaagctattatgggcaaactaaattaatcttcactgagtagacaccatgttaatacatatgcaactgattgactgaagctagcaagntgttgcactaaatgatgcatacagagacatgtccttatgcatagaccgtgtgtggctgtgtgtgggcccacaactagaagggaataaatctaagggttggaccaatggagccacatgtgttcgacgacactgcagctcacattcatacatacaccatcccacactcgttttgtcatcgatatcgctcgtaattaatgtaaaaaggcactgtcgaaacgcatcgagaaatctggctcaaatctaagctactgagctacaccactagtgtttctctcactcaaacgatgcgtccatgaaagcgaaagagatccgaacanatcatagggagaagaaaaatcaacttcttttttgcaacagcacatgtgtacacgctgatgaatgga

SEQ ID NO: 77912 - DNA, 410 bp, Oryza sativa
atcttaacatattctgttgtacatatatattgtttcacacgtgaacagtatgatttataactagtaatctacgactaatagccacatgaaagcagtctggtttgtttggtaaattatagggtacctacaaacctacaaccaggctcaaactagagaagaagcaaagctgggtaatactcctacgattgtacggagcaccaatcactgcatgccctaaactgacaaataaaaccacacctaccactcttgatttcagatttactagcatttcttgaaacaccaagtgtggaatagaaatcctgtaaattaaaatatcatatccatgtcaggaaactggattttctaataataccagcaaagaagaacagcaaatgaagtaactcacagcatcagctctgacaatgaacctt

SEQ ID NO: 77913 - DNA, 448 bp, Oryza sativa
  unsure (1)..(448): unsure at all n locations
agagagcagctctctgctcatgagaagagaccacctgtctctcatggtccagaatctgagagataaaattgactctatatcttttagttgcaatggaagtatnttcctctccaagaaacatccatctgttggtacatcttttcttccaatagattttcctaaattcaagaagcttaatgacttggcccttaacaattntcctgaaattccattccttcactgataacaacctagcttcttcaataagataaagaanatcaatgacccggttgcaatttgtaagaagcgagttcaatttagatagaattttactccaattgagcaactttntcctgagcattttaatcttgagagaaatacattttgtaggatcatcanatccatgatccanagcccaaaccatactgactatctcataagagcccacaatatcanagccaatagtttc

SEQ ID NO: 77914 - DNA, 429 bp, Oryza sativa
  unsure (1)..(429): unsure at all n locations
agcttaacttatgttttgtgcatananantttacagtaatgtcttaagtaaataaactaaagtggtattaacctgtaccttcattatcttgtgactactatatttgtgcaactagttgcgctatgcaagtataattcattgcatcatggctgtatcaaaaattggccagaaagataatggcttataacacacaaaatatatgaaggctatctatttatgacaacacaggttaagtgatgaaagtgagcgtgaaattgtgactggtgtcaacaacattcatgtggtgtttgaatcttctgaagatgaagatgaagatagagattaagtgttttacgcaaaacgaggtggtaataacatgtgattaattaatgtttaattattacacacttcaaaaatggactcatctgttatttttaacacgttcatata

SEQ ID NO: 77915 - DNA, 361 bp, Oryza sativa
tctcagctgtcgaattgagtctggtctgtggtaccccctcttgtttttgaaaacaacgaacataagttggaactggtgttcttgtctcaagaccatcacttagtgaagaatgcattggggatgtccgagttaaatattgaaatggaaaaccacttgttgtgtaaaatacacggatcatatttgtcaccatgctagatgtcaactctggttacctgtggttgtgagtatgtccgcccgaatttcatcaaattccaacgctacatggtgtaattttgacagaataggcgagccataaacaaatgatatagaggcatattctctatataaggattaagtattcaagcattttatcaacataaat

SEQ ID NO: 77916 - DNA, 452 bp, Oryza sativa
  unsure (1)..(452): unsure at all n locations
ttctttcactctcatacnggcaagaagagctccttctctttttgccaaagccctttcttcttttccttgtgcaagtcaacttttccctggcacaccgcacaggtcagctgtgacatcttgcacttgtaagaacacttgcttgcctttatgcttgagtttcagcattcctttactccattcaactgtgatttgagcaaaacttgacaaccagtcaatgcctaaaataagatcataacgttgtacatgaagcacgctaacttctgtgtcaaattcatggtgttgtaacttgaattgaaggttgtcacatttggtactggtcaataacttacggcgagacgagcatccctataccacgtgtatccacactcgtctgtccttttctacttagntgtacagatcacttcagaaaatcgtataaaaatcaagcacgaaaacgtatgcgctttatcaac

SEQ ID NO: 77917 - DNA, 426 bp, Oryza sativa
  unsure (1)..(426): unsure at all n locations
actcagcttactgttgaacctttaaatgcttgtccaacttctatttagttaagtaactgcggtataaaaggatgttaaggtattgggcacttgatcacgcgcactctggcctaagcaaaaagtgcctaagtccctaaaagaacgtgacaggccacacctgataatatgggctgcagacatattaggcctaggccacaacatatgccttcgtgtcacgtcctgataaattcatcccgaattaaaattcattntctaaaaggaataatagaattaattaaaattcaaaaagaaattggcaaacactataatacgtgcaagaaaaantcaaatgtggcccggagagatattgtaaattctccttggtctaaaggagccctcaaatttacttgaattttatagcaccggatataattataaacaacaaca

SEQ ID NO: 77918 - DNA, 221 bp, Oryza sativa
catcacaaatatccagcacgatctctttcacttcattcaccgtgagtattgtcatgtggaaggaaagttcttccacccacaaggtgccctaacatcatgtgatgaatacaagaatcttcgggagcgtagcaatgctatgccataaatgaattagataacatatttcatgtgacaatatgggaaaaatttcgtataatttgatgacacctttcactcataca

SEQ ID NO: 77919 - DNA, 411 bp, Oryza sativa
  unsure (1)..(411): unsure at all n locations
aaaactcagcttacataatctttgtntaacaactatcccattggagttgtatatctgattttgaaanagaggatttctagagctgcatatgcgcattctcctatactcttgcagaatgatttcaaccgcttctagaaacaaattgccgcaatctaaccatattatgtcagtttggtttcctcaaagttaaaaaaagatgccagcttatttaaacaacatgttagcctatgggctactccatactcaaactatacatgttaatatcacttacaagatagtcaagattatgttaatattntataattagntttcaatccatcacaatccagtgcacatggaactatggaggtaacataagttccatttcggtggtggcctctgattaagaaactatanagctcatctatggat

SEQ ID NO: 77920 - DNA, 427 bp, Oryza sativa
agcattgagaacgagaatacttttttatagaaaaccaaactaagaatcaagatggcattgacgaaagaaaacgaaacaccaaactccataactccaacagtaagtaccgtgaaaaagaattaccaaaatgttttttgataaaagtaaacaccaaatttcaaataacaaggaattatttagttcaagctcacaagcattagtatccaaataaaagcatgaaaccaaggcaatgcttttcttataaaatgataggccatcttttagaaaacaaagagtatgtaccatgttaaagatttataaacaattatgttcttcaaagagaatcaaacaccacattcacgagaagtacaagaatgagaagcttctacatatatattcttcttttaggagacaagacttacaaaactaactacaaacttttttacaa

SEQ ID NO: 77921 - DNA, 449 bp, Oryza sativa
  unsure (1)..(449): unsure at all n locations
agctntagatagtgcctatgcaaacaaaagcttagctcagctacatgcccctacaccgtactacatggctctctctgcactgcacagcctgcatatctgcaaaatattctgcgtgcctaggagagcctttctgcaatgccttgccgtgccacgcatgcagcagcatgatctaggttagtttctgagcttttttacagcatattttttcaggctttcagctcccctcattcatcctgcctgcctgtaaaacccagatctgatgctcactttgcgcattgctgtgatctgcgagaggatcaagatggcagccgaggggaatatatctaggaatccagtttgcttctcgatgttgctgttgcatcatattctttgcatgcanggggcaagccagccaccacgcatgcatgaatagctagcagagtggtagtaacacatgcatacatatcagt

SEQ ID NO: 77922 - DNA, 403 bp, Oryza sativa
  unsure (1)..(403): unsure at all n locations
gatattggcacggctcaatcaaaccaaacaaaaccatactgtatattcctgcatcttgcttagctagagcagtaagttgcccggnttgattgaaccatgccaacatcgcactctcccagcccaagaaaaacgcttggatgcaaccagatcatatcctctcatataaatggcttgcccaacagctccgcaagtgtaaactgatcaagagatggctgatnaatgtcatggaaatatgcagacatcgagctgaattaatagccggcagcaacgacatggcgaacgcaaacccaagaagaaaatgatatgtagaaatggttgagacgtccatatctcgccttgctctctctcacacggagaaaaggctaggcaagcatgcatcacacggacaaaaaaattatatata

SEQ ID NO: 77923 - DNA, 467 bp, Oryza sativa
agcttcgtctccgtcgacaacccgaaggtttccgccgtttcctcctcgtcgtcgtcgtcgtccgttgttcttccgccgccgttttggtcaccggtgtgttcgccgcgtcgtcctctacatgctggtgccctccgttttgcgtcctggtgccgccgttcgccggcaagcgtgcgccgcccgagccgtccgctccgccgagccgacgccgctgtcggtgacgtcaccgctgacgtcatcggggtcgtccgccgtgagccggtcgtggaccgttcgatctcggccgtccgttttggattggttcgatctcggccgtccgttcgtgtgaaccgccgcccgtgcgcccggtccaccaaaccctagcccgctgacgcaataatacttcttttccttttcaaaaataattcattattgcgtcataattcaattttaaccgatataagtggtttaatccgattaatctttaaaaa

SEQ ID NO: 77924 - DNA, 365 bp, Oryza sativa
  unsure (1)..(365): unsure at all n locations
ttagagcggatgcgcccgccaacagcttaggatgtgcaatgcgtcactggctgtatggccgcctaagtcggttatatcgggctgggagagaggcgctcccctatttaagctcctaaacgctccggccgttatctggcggaggaagctaacngccctcactaantgaggcgacctcattctccccatctggcgcccgagccaagaccgtgtactctactggggaaccnccagtggcagccgggtggtcgtcacacacagacacctcgtccccatcccacctggtgantgaccggagaacaggagagagccccaccgacgggccaggcctgacgcggatgcctcgccgtgtcaaggcagccccaccc

SEQ ID NO: 77925 - DNA, 369 bp, Oryza sativa
  unsure (1)..(369): unsure at all n locations
agcttctatatactgtggaggagaagctcggctggtgggcanggcgggctgtggaacggcgtggccatcaatcaaccccagaggaggcggcggcggcggatccgggcagtccaagtgcggcggcggctgcggagtggaggtggattatattggattgctgctggtagccttccccactggcgatcactctgactgtgttgcgttgcgccgactgagtacttgggtagagagacaggggaccaatggaagggattattgatctgcttatttatggttgttcttcccggttccacgttggaaacaacgtgtttctttcctctaatatcaaggctgtgactgggatcaagtttcgaagatagggttgggatc

SEQ ID NO: 77926 - DNA, 432 bp, Oryza sativa
  unsure (1)..(432): unsure at all n locations
agcnttcaaagatgaccttgacagcacacggcttgagctacgtaagccgaatgcagaaagttctgctagactgacgaaaccacacgctaagtccctaacctgtcggtgttaaacattcgatcaattgtagtttggaacaaaaatagttttatctgatacaaaatcctaactaatatagtgagtatatttcacaggaaatgattatacagtattccagggagtgaagaatccttctaataatgttacgcaataggaagaaaaaaaataaaacatcgtggtgtgtcatcagatccaatgacaacaatgatcaagatgattatctacaagacttcactcatgttggaaatattaagaatctcaaaagctcaataacgaagaagcattaacgaacacgagacgggattntttcttagagaagaatcattaataaat

SEQ ID NO: 77927 - DNA, 353 bp, Oryza sativa
gctgcatctcactgataaagggcataaatcagctgtgaatttttactagagttgaacattgatttacattttcggctcaatcattaagcacatattccgaactataacatcgacttattgaaacaccccaaagacgatacaaacttaggagcatgaatcaattgttctctgcaccggcattgaagcttgtctcttggacaacacaattactaaccaaaatcgaatcttgggcaaaatctggctaaagaatttgagctgatataaatgccgatcggtttacaccagggcagatttagccacacatccatgtatatataagtttccatcaattcttggttttgagaagagatcaa

SEQ ID NO: 77928 - DNA, 427 bp, Oryza sativa
  unsure (1)..(427): unsure at all n locations
agctngaatttatgtatatatatatataacatacttatgtaaagttaaatatatgtttttatagtttaatgtttccgtatttgttaccggtttccgatctgtaccgacatgtttccgtccgtattgttccgtttccggttttccgatatttccgatatcgtttttgtttccgactttatcgtttccaatttcgtttccaagaaaaatatggttacggaaatggttgaggctgttttccgatcgttccgaccgntttcatccctaccttagatgagtgtggcagcgatgttttgctatgttagtcccactgattgatgtggttaaaagaagtatttttaanataagttctagaatgattattttaaaatntaaaaatcaaaactcaaaacatataaatataatcgagcggacatatatggactacaat

SEQ ID NO: 77929 - DNA, 433 bp, Oryza sativa
  unsure (1)..(433): unsure at all n locations
cttctaatctataanaactgtgtactaatgtatatacactttatacttatctatagaaactttgnactggggtatatttgtttggtttatgataagtactgattaattctcgcgtttcattattttctttcttttttagtctaacttgattgtcgaaaaaatatattaaaaattacttagtaattttcatagcaatgcgcggggaatcacttcctactcaacctattatctactccttctagcatataattaaatgattaattaattagtaccgctttacttgcgatgcatatgattctttnttataagacgttgggtgactcacgactagctagtggtcaagaactcaagattcatgtngctctgtcaagctagctcctcgagagtaaacgacagataaaaaagtttaagcgctcgatctaaatcaatacta

SEQ ID NO: 77930 - DNA, 252 bp, Oryza sativa
ccataacttatattgtaagcacactcttatgtacactatattctgatgcattatgatttaattcatagttatttatagccatttacatgtataagggtccagatctatctggacatgccgtgaggtgtacggtgtgcgcgcggtggtaatacggtgtgcagccggctattattttgtaggatatgtgaaataaccattatctggtatattgtatataaaacatcttcttttaaatgaatagatttttggatt

SEQ ID NO: 77931 - DNA, 240 bp, Oryza sativa
aaaaaaaatttattttcaaagaaggggaaggaagaagaacaaagcaaaaaatataaaagaagggaaaaagaaaaaaaaacaaaaaagaaataaaaaaaaaagaaacaaaaaaaaaaacaaaaaaagaaaagaaaaagagaaaaaaaaagaaaaaaaaaaaaaaagaagaaaagaaaagaaaaaaaaacaaaaaaaaaaaaaaaaaacaaagaaaagaaaaaaaaagaaaagaagaaaaag

SEQ ID NO: 77932 - DNA, 492 bp, Oryza sativa
cagctcggacccgggatcctcttagtcgcctgccgcatgcatcttgtgttgaatggcttgaccacttctatagcatgaatagactttacagcttataaccccagatgaagcattacggctgtgttgttgatctcctcggccgtgctggtcagatggagaaggcactgagattcatcactgagatgcccatagatcctgaccctgttgtttggaggatacttctgggatcatgcaatacgcatggcgatgtatccattgcagagatcgtcacctagaagctcaatgagttagagcccagcaacagcggaaactatactctgttaagcattgcatatgcgagtgctcatagatggagcgaagctatgaacgtcaggcaatgtatggctgatactgatgtgaggaaatctcctggatgcagtgctgttgaagcggctttatccagcgacacgtatgttcgtgactagcaaactacattgcatatactgcaatctg

SEQ ID NO: 77933 - DNA, 292 bp, Oryza sativa
cctgcatgcatgtatgtatgtatacctgggtcgcgctaaataaaataattcttactcgtcgaataaacgtatatacgtattaagaaaagtaagatatcgatgcttcaccataaaggagctttgtgttgaagctaagcctctataaaacagaatggtcttaaattctgtcaaactaaaattaatggtctgtctgaaagtggtggaatttcacttagaaaagtcctgttttaggcattactcaaactttataggaattaaataaattaatttctagagtctgtacatataaact

SEQ ID NO: 77934 - DNA, 397 bp, Oryza sativa
  unsure (1)..(397): unsure at all n locations
ctgcaaagangggntgtgttgtatacatatggatgcatatgactacgcgtcttttgtggtggttagattgggtggttggtaatgtccatcggttggattcaagcactgaccgagcggcagtcgcaatccgagaatatagcggcgagggcgatgccgatgtctgcgaaggccgtcatcgtgctctgcgccaccaagcttcttcttctgtctgctgctcagcggccggatgacgcttctgatgccaccgccgtcgggcagcgtcagcgccgccttcttcggtcatggcttcaggctctccctcttcttcgacgactgcgagcatcggcatgttagtatatccattcatgcacattttaccaacatctttacagaactgcataggaacaactgaacactc

SEQ ID NO: 77935 - DNA, 431 bp, Oryza sativa
  unsure (1)..(431): unsure at all n locations
cgatgagaaaaaattcctctctaattaattattattatttatgagcctctcctaccatntctcgtcagaaaattaaaaagctttggtgatgaaggtagcatggatccacaagctccgtgtggcgcagatctagcagcggcttgacatggatcaagccataacgcttatctcctttgtggctatatgggaaatatgtacatgatgggggcggcgggcgtggagtgtgaacaacctcgacaatgggggcctctcctcaatccggtgttatctgggcgtgatctaatggggtggcgactcaagtacgagatcggggtgaaatgggtcccaacaacgagctcaatggagcactcattttttctccatgggtaccgaccggtgggcccactcgttttctcatgatgcatgccacctgcactgtaagccaatcttgt

SEQ ID NO: 77936 - DNA, 420 bp, Oryza sativa
tttatgcatgcttaactagatggaggccagtggaaaatatattcttacctcacagaactcatattgaaagcacactcacatgttcacaatattcgcaggcattatgatttagttcatagtcatttatagccatttccatgtataggggtacagatctatctgcgcatgcggtgaggggtaaggtgtgtgtgcggcggtagtaaggtgggcgagcgggctagtatattgtaggatatgtgaaagacccattatcttggttttatgtaaaaaagaacattttctttctaaaatgtaaagatcatttgtatccgatgaaacaatcgtatatttgtttttacctccaccactatatatatggccactgatcctattatgacacgtggataatgcagtcaaagaaagaatctctgaagacatatg

SEQ ID NO: 77937 - DNA, 421 bp, Oryza sativa
  unsure (1)..(421): unsure at all n locations
ttcttatactttatttttctcaaccttgaatatatccccttttcttttctatacatgtacaggaaaaattactcctctattaatgaaattgaaatagtcaataccgggtctagtctattacattgagctagacgtgtagagaacaacgttgcctggggttaagacttggactgagatgtatatgggttaggaattgcatgggtccaggtaggccacatggtggttgtggctgcaagaattagttcccgcttcaacaaagttccacgacaaagatatntaatccacacatgttgttaacgccaaaatttggtaagcccgaagtcatcatcggcttagagtcagtatcggcttcagagtcctggaatcggccgattggagtcggcatgtcaccagcagttgtgtcttaatggagtcggatcaa

SEQ ID NO: 77938 - DNA, 441 bp, Oryza sativa
  unsure (1)..(441): unsure at all n locations
tcagcctgatattgctttatgggagaagatgcatgacacttattattctattcttgaattaagcaagnatgcaatattgatactagcatatggcttgatttatcaatgcttatgtatgtgctttattatagatgtattcctcaaatagcttttaattgctcattgtgcaagagaataaaatctatgagagaaaaaaaatgaataccgaatccttggaaacagtcttgacaacaaagacgtattccatgtgagcaaaaataatgggtgccgaacccttgtaaacagtcttgatgacaaggacgtacctggaataactgagagaaaaatatgaacaaaatgggccccaataaaatgttaaaaagtctcttgattgttntcttctaaagtaaaattgagaagagtgataatgcatacgatatatatgttattcttaactatgtc

SEQ ID NO: 77939 - DNA, 451 bp, Oryza sativa
  unsure (1)..(451): unsure at all n locations
agctntcaatttttatgttntccaagaatagcacagacctttatactccagtaaaatactaaaaagagcaaatgaataattaacctattctgatcaaataaagtagtacattctagtaatcaactatactttagttctgaattagcttgctaactcgctgtacatgtccttcagcaggggcggatccacagtctaacgaccggggtcatctgacaccgatgacatccagcgaatgcacggtgatgctcaatttctaccagctgtgaccccggcatcagatggtaaatgaccccagccatcgtcttcagctggcacgtagtacgtgaaactaaaacaattcacttggtggtgttacgatcctagttgattaatgattcttttattagcatgcataaagtccgagtcagatntcttttgtttcctaagcctcattggtattaattggttcttc

SEQ ID NO: 77940 - DNA, 442 bp, Oryza sativa
  unsure (1)..(442): unsure at all n locations
agcttgcgttttgtggttatgttctatctgaaancccgacgctgctgggctatcatgatctgcttgacaagaatgagtcaaacaattcggaaatagaagcattgagaattagaatgcaccactcactcattcaattccataatgaagttcactgatacgttgtacagtgtgtctaccgaatggaaataaaacggggtcatttttttttctttgtttattgtgcggctctgcctccaccatcctgctaattggagtagcgatatcgccttcccccagcataagcatgtctggcacattgccttgtgtacaaaaactatatttacttctaatatattaacgtgcaatnctatttgcacgtaagtttttcttttttcttctttttcctccatggtggatccatctccgagacttgttttgccggacaaatccacgatgtgatcgg

SEQ ID NO: 77941 - DNA, 433 bp, Oryza sativa
  unsure (1)..(433): unsure at all n locations
ctgcccttcacatactgtgttaaactccatcatatatgatcctgctgattcanaggctgtgttggcagcagcacgtgataaaataatggtgtttcagaacactatttctgagtgtgaagaagtggagaaagatgtggatgatgctgatagggatgaagattctgagtgtgatgatgctgacgatgatcctgatggtgatgaagtgaatattgaggaataagatgtcaagactttcctggttatgcacaagatggtggcatgccaactgcagttggtgacataaagaaggaaacaaatagcatatgtaactcattaacgacaccactcatccacactacatcttctgagagtagctcatagcgcactctggacaagnctgttctaagtcttactacgagcgatctaccagctgaaatctcatcggataatcatg

SEQ ID NO: 77942 - DNA, 365 bp, Oryza sativa
agcttatatattgttcttaagagatcttgatgaactagtggagcctatattatgaagaataactaccaatgagagaaatcaactaggttcaacttgaaccatgtcaccactcttgccattgccatgctattcaaatgatccccttaaagtcatcctccgatgttttacatttttattaaaaaataccaaaaggattctactttcgaagattacaaatctagatgcctcacccactccagaggacgttgttaaaaaggcccttacaatgatgttaggtaccttaatgtaaatttttaatatagattgtgtttctatgattttgtatttaacatatttatatagatcggataaatcaaatttttatg

SEQ ID NO: 77943 - DNA, 419 bp, Oryza sativa
  unsure (1)..(419): unsure at all n locations
ccgggatcctctgagtcacctgcggctgcagctttaactgcatcttaccaatggcattcgatttactcaccgcgttcggattaccacccgattcgatagcgataatcgccgtgatcaattgtggatcgacgccccaggctgcaccggctttctggcttattggcatccactgcatcgcacgttgcaccggaactttcgcgttccacggcgggttcgtatagtcatgctttgatgaacaacccgctaataacacaatcaaaaaggcaaaccatctcaatttcacttcttctatccttatagcctggaatcgccgntgaggtgacaacggcacacctaagcggcatgatatacatttcgtttctgttgtcagcaaggaatngccatgtctctgtttcacttaattgccccatcgggttact

SEQ ID NO: 77944 - DNA, 416 bp, Oryza sativa
agcttcactattgtttacttcacgagttgatttcaacatcaccaaaagaaaaaaaaaagtctcatgtactagctttagatgttatcaaggttattggaatagtagccggaataaatcggtagtgtaaaatcaagggcatgggggagccaaaaatgataaggaataccttttgaagaaatagaacacgtcaaaagtttcattggctctgctcagagcctcagacatcatagcaagcacagcatcaatcgtcaccgataagacatgtgaccaaatatttctaaagcacagccctctcatcatccacctccatctcatctgcattgaactgcatggacttcaccaacctttttatcacggggctacttctactctctctctcatatacgaatccgatgtttgcacagcaagtgatgatg

SEQ ID NO: 77945 - DNA, 453 bp, Oryza sativa
  unsure (1)..(453): unsure at all n locations
ttcttaattctcttatgattcactggaanaagccggcgagcttgatagggtagcaaggagctcaaccacttatggcttattcggaatggaggatcgaanaaacacaggaataggaaaatcataggaatatgataggaatgcacgtgtaaaacagagaattgaaaaacataggaatactatataaacatgcgttcggatagagcgtatgaaaaacataggaatttttaaagaacctacccactaactaaaatcatcatgtgtcagaggagtgaagcttgtgaagattagtttgttgattgcctcgttcccatgcacaggaaaaataaaaagaggttggagtggattgtttgttttctgtggaatggatggccaacgaaattatacttctatttcctctgatttcctacacgggattctttgatccgatgctgtacanacccgaatcatagaatg

SEQ ID NO: 77946 - DNA, 269 bp, Oryza sativa
tctttgaagcttaacttgggaaggtaagctccgtctgtcgactcggacgaagagtcatcttcacaactatgtcttctttgggcccattgatgaatgtcttgcgcgcaatcgccatagtcatgattttatcatttggggcacaggcagcggatactctgaccaagtgtcctttactgtatcattggacaccctggcatacccagcttgcaggtctgtgcctgacccttgctgtatcgaagcttgtaatccatccctctcgacttatgacc

SEQ ID NO: 77947 - DNA, 449 bp, Oryza sativa
  unsure (1)..(449): unsure at all n locations
atgcttnttctgttcatcccaatggccgaacaagcaaaggcgcacaacctctctccgagtgttagcggtgacgacggtgagccgaacccacgccgtcgagctcgtactccaccgccccctccacgccaaagtcctatgcgggaggaggcgctcgagagggtcgaaggatccgcgacttcgacatccacgggtgatggggaagggcggcgagatggggagcgtcgcctcctcgtctactgcgacggcagcacgccccagggcgcgctccaagctgcgggcgcgctcctacgtcacccgcccattgtccctgacccggagtctccagcccaacgttggctggacgacgtggccaacttggtcatgacggcgcggcagcgcctagatactggtgggcggtcctctcgcaccaagacctctggtactgctaccaccggctccacgttgtcaag

SEQ ID NO: 77948 - DNA, 373 bp, Oryza sativa
  unsure (1)..(373): unsure at all n locations
gtgataganaatgagggccatctttggggtgtcgctggagcttctcgccttcaaaagctccttattgggacggctaatctatgcaactaagctccccgggttgtctagtgtgtgtgggtcttggtaagagggcttgggcactcctactttggttttttctttgtgttggggttttgtatggtttttcttccccttaatgaaatgaaatgcagctctcctgcgttttcgagaaaaaaaaagggtgcctgtatccatatattcatttatggagaataattattctgctaataaaccagcataccatcattatgatcaaagatatatagaagctcacttctagtctatgtaaagtacttgagaaaagtgtatcact

SEQ ID NO: 77949 - DNA, 485 bp, Oryza sativa
atcctcttagtcgcctgccgcatgcagcttgtttatgaatggcttgaccacttcttaagcatgataagactatacagcttacaaccccagatgaagcattacggctgtgttgttgatctcctctgccgtgctggtcatttggagaaggcactgagattcatcactgagatgcccatatatcctgaccctgttgtttggaggatacttctgggatcatgcaatacacatggtgatgtatccattgcagagatcgtcaccaacaagctcaatgagttagagcccagctacagcggaaactatactctgttaagcaatgcatatgcgagtgctcatagatggagcgaagctatgaacgttacgcaatgtatggctgatactgatgtgaggaaatctcctggatgcagtgcttgtgaagcggcttaatccagcgaacacgtcagttcgtgactagcaaagacatacattgcatcatactggcaatctgt

SEQ ID NO: 77950 - DNA, 337 bp, Oryza sativa
  unsure (1)..(337): unsure at all n locations
acattctggttttggcgaacgttctttctggaggagtgcagccaacctgcatgcatgtatgtatgtatacctggttcgcgctaaataaattaattcttactcgtcgaataaacgtatatacgtataaagaagagtaagatatcgatgcttcaccataaaggagctttgtgttgaagctatgcctctagaatacagaatggtcttaaattctgtcaaactacaaataatggtctgtctgaaagtggtggaatttcacttagaatagtcctgttntatgcattactcatattctataggaattaaataaattaagttctagagtctgtacatataaact

SEQ ID NO: 77951 - DNA, 429 bp, Oryza sativa
  unsure (1)..(429): unsure at all n locations
atcttctctagtaccgtgtcggcactggtccgggatgctgggccatcattggtataatataaagatacacatacactgatacgcatgtgcaacgctcgtttctatatttgtgtacatggattctccagttccatctctgtagattgatcggccctgtttgttggcaaaggctgtgtttagattcaaagtttggatccaaacttcaatcctttttcatcacatcaatctgtcatacacacacaacttttcagtcacatcatctccaatttcaacaaanatccaaactttacgctgaactaaacacagccaaaatgtntttctaacatgtgtggacttttgatgaggaggcacaggagaatggcactatcagtantaacagacggatgatcactgttacagtgctgcccatgtcaaactggaatcctggat

SEQ ID NO: 77952 - DNA, 200 bp, Oryza sativa
  unsure (1)..(200): unsure at all n locations
ataatgtgatcactctttntctttttgtccacattgttaagtgaggccagagaaatcttcaactggtatcatcgcaacacagaaaattagattattaaaacattataacacctcggaccaaatagtaacagaaagaaacgaagagaagatggaacattttgaaggcaaatctgtgcaacgcgcgagattcccaaatgtag

SEQ ID NO: 77953 - DNA, 449 bp, Oryza sativa
  unsure (1)..(449): unsure at all n locations
actattgtaactcggcatcatatctttgtttctttcatttggtaagaaatgaacctaatccatgtcacattgccgaaatagtcaaagcttaagattggtaaacatgaactggtcagctgaactaagcctcaataaaaaaaaaagcagagttcataaactagaagcaaactgttctgacaatctgccccttgactgagtcaatcagaaagtcctaccctgattgcctgaattcacaatctgaactgctacagaagcatgaacaaaatttctaatatcccangttcatagcctgcaagatcatgcttgtttgaacttttgctaagctgggtgatgaactgatgatagaagaaggtgcttacaggtacgtgagctggccgagctggccgatgctgctgctcattgttccctgcaggatgacgcttgacacgcctctgtcaaaaccagagaca

SEQ ID NO: 77954 - DNA, 463 bp, Oryza sativa
  unsure (1)..(463): unsure at all n locations
agatcctacacatattattacatggatggaattttctattctnttatagatgcttctatacctacagctgtgattagaatgaanaagaatgaatttcgaagattgaggcaaggctttatgacagtacaagaatatttgaataaatttacgcaacttgctcaatatgctgcctctgatattcaagatgaaaaggaaaagattgaaaggtttatagaaggactacgtgatgaacttcgaggaccaatgattagtcaagatcatgacaattntcaaagcctaatcaataaagtggttatgctagacaatgatcgtagaatggtcgaaggacttcgtaagagaagaatgaatttcaacgacaatcaccaactanggggtcactatcagttccgaagccttatctaattagccatctttcccaatgcagaaccagcatgccacaatctacaagactggattaaaatga

SEQ ID NO: 77955 - DNA, 388 bp, Oryza sativa
  unsure (1)..(388): unsure at all n locations
agcttatcacttncagaaaaaactcatgtagaggcacttttgtagaggtgccctctaaaattaggagtttcaaagtgtatagacacattttagaggcattttaaaaattgcattgaacatttttactctagagacactttagagacatatttagctaactttgttaattctttatcgtagaggcatatttctggcataatgtgaaaatggtgaaaactagagaatcttttttggaagatggtgaagtactgtatatgtcaagacaatgtatatttgtcccttcatgtcgaaaccactagtgtcccccaccaggcaatggatggcgccggcaacggtggcactcggtatgataatgaagtcgcaggtgtgccctctaatggagtataca

SEQ ID NO: 77956 - DNA, 362 bp, Oryza sativa
  unsure (1)..(362): unsure at all n locations
catcaccataggctaactatggtcgaagtttaantatgcttgtcaacaacagttttgccggcgttgcgactatattacagctaaccagaatagtccaacaagcataaagataggagcggctgcagccctcgtctgccgaacaggcccaatatttctgaacatgtggaattataatttgtacgttctatatttaaaaaaattactcttaggtntttagattattgaacatgctcgctatatttaatcctttttctaaaacagtattcctgatgtaattaacactagtgcacacgcgcatatatgcatccagtgcattttttttaaccagtgagatgcgcagtggaccggatcgatccgtacgt

SEQ ID NO: 77957 - DNA, 474 bp, Oryza sativa
  unsure (1)..(474): unsure at all n locations
agcttatctgtttaatatgaagtaattntccttaagtattcctgcacgtttgttctagacaagtgtttatgctaaggaccctataggagaaacctcttcggtttattctcgtttttagcctgcatcttgcataggcgtctggagaatcggtatccgtagagaagtgttcccttcgggtggaactgcctgnggagacgataaactcttagctagaacaagtgtgacttggaatatctttttaagttgcttctaaaaagatagataggtgaggcatacggtgagtaccgagtaggactttacatcatccgaagcaagcttctgaggctgtctaaataggattcgccaccctgcanagatcctaaagttaaaatatctctcgaagtgaacagtattgaacagtaatntatacagtaaactgaatagtggttttgaatagtaatcagccgaataaacagtatactgaatagtattcac

SEQ ID NO: 77958 - DNA, 473 bp, Oryza sativa
  unsure (1)..(473): unsure at all n locations
tttacactaagcttcaccgactctcgatattggcntntagcctatgtatctctagtttagttataatatgaatttagntatttatcctattgttatataaaattgcttttggtgaaagtgtcagactagcccttatcctaagacctagttgagtatgagtacgaagtttgagcaattgagatgatcgtggaatatagcattattatggtcactgtctcctgagatattatgtaacacatttgggcactgtcttcgagtgttttgatgagtatttttaggttgaatttgactagcaagctatccgatcgaatatctcccttgctcattactcaacgctttgggttgtatattatgtttggtatttcacatgccagatcagcgatgagggtgggatagtatacgttattntggttgtatttgagacatcatccaactaaatagtctgtgttgcatgcttatagcctacatatata

SEQ ID NO: 77959 - DNA, 337 bp, Oryza sativa
agcttgctctattttattctaagctggggcgggaggtggtcggtgagacagtaaacctgtgtggcacatcagcatgaggaccatgtgcgggcggcgtatgaacaagacaggtaggcgtgggcggcataggaacaggagttgcatgcgccggtggtgtatgagcacgatgagcaagcgtgcgcggcgcacgaagatgatgtgcatgcgcgcgtagtgcaagagaaatagtgcgcatgcgtggcgtagcaaacgacgagctcgctccatcatagccgaggctgtggcatgtggtggtcggtgacacaattaacccgggcggcacatcaacaggaggagc

SEQ ID NO: 77960 - DNA, 357 bp, Oryza sativa
acattcacacacgttcagcttacacgttaactgttgggtagatacaatttacaaaacataaatacgtgtgctacatgataaacgcagcttatctagatctgaagcaaaatatgatccctactgacaaactctacaatgtacgaagtccatggcctaacctttcacacgaaagtagcctgtttatatatgcaacaccaccatacactgctgactgtatgtcaaggcaatcatactttcactcttcaacaaaatctgacactgaccaccaagataaccgtggcacagcaatctcctgaagtttggacagccctagctctctttgacaccatgatcttgccgaacaaactgaccctttac

SEQ ID NO: 77961 - DNA, 426 bp, Oryza sativa
  unsure (1)..(426): unsure at all n locations
ttttgtacttttgaacaacangtttcaaaaaaaataaaagaaagttataaaatcgacctactaaatttattttattgcagcaagattaaataaaacaacattgtaaaacttttgctggtaaatgagccattattacagtaatagatgtacagtactaataacactggaataaattttgaatgagaaccattaaaagagattatgaagtgcatgtgccattagtttggtttaattaaaagagaaagggaggagaacagttctacttttccaatatttttagagggcttctatggataaccatttggcataacctatggtcaaggggctctgataccaacttgtcacgcccggaatntctattcaaaattctaaacgcttacatgtgtgtgaaccctcgtccaggaatcagccgacgcacataataac

SEQ ID NO: 77962 - DNA, 176 bp, Oryza sativa
atggagctgaagaaactacatcacaagaacttagagataaaacagaacatgcacatgcgtgaagagcaacacgtatatgatgcgttaattattgcccttatattcattttagacgatataggcatggtcaaagttgcatctgcctgcagatactataagaatccctatcactatat

SEQ ID NO: 77963 - DNA, 331 bp, Oryza sativa
  unsure (1)..(331): unsure at all n locations
agcttatcgtctactcataatacacgtgggcgacgagccggatgagggggcacatggtattttcctggtgtgcgtcgtcagctctaggacatcgatttgtggttcacaacagtattgttcaatcggcaggcggcgggtggcgtctctcatcgatggatggaaaggggacactggtgagcggcggagctgcggaggcggcttanggtggcgagtggtgagtggcggaggcttccctcgtcgccgatgagattaagtgggcagcgccgtcgatcgctcaggatcctgccattccttgtcgctctccacctccaattcactgcttgcggagcct

SEQ ID NO: 77964 - DNA, 444 bp, Oryza sativa
  unsure (1)..(444): unsure at all n locations
cgtcatctggtcctcatccatcgtagtgttctgttctatgagttttaatatgaaatggggtacgaacatggagccaaaaaatgcggggagccatgaacaggaaacatctattggaagaagtcagccattgttcgctgggagagtcatggaaaatacgaaactacgtggcttttgcggctgagagtggaattgtgcatggtgctacgggcattatgcaggccatccattatgtctgcaatttttgcacctattttgagaaaggctcccaggtctaagcttcttatctttaattatgggtatgagaatgccatgcatggctctctttctttttgggaaaaaactgctatctatgataactaagagtagtattggctgcctaactanatctaacgattactgcgagtctataagtagaaactatccaaaaaacttgacctggaattt

SEQ ID NO: 77965 - DNA, 528 bp, Oryza sativa
cagctctgacccggagatctcttagacacctgccgctgcaagcttaaacttttgatggatcacacaaacatggagatagataaacccacggacacgataacttctcatatgctgagtcaggaaagaaatattaaaataacactacttatgtcatttgcagttaatcttctattaacttattgtcaaactgctaatccctgactaactagcaagtaaactgtagcgacagatataaaacatctgcccacttattaaaacactcgtacttagtgaatctgataattacattggtcacgacctcttttaagaaaaagtgttaaatcaagacatcgatgaagagatgtacctggcatgcccaagtcatttagacattctgaacaatcttcagatagcatgtcaaattcagcctttataacgtaaggagataaaacatcacttagcattgagttgctgagtactgacagcaaactactttattcggaacaattcagcagattgcaatgctactatgagcgaagatggaatcat

SEQ ID NO: 77966 - DNA, 374 bp, Oryza sativa
  unsure (1)..(374): unsure at all n locations
gacgttcgtactccattcaagcatgaatgatatgtattgtctgttcacgttgcgttatcagcccgccacttgaagtaactctgactgtgtcaatccattgtacgaattgacattttcttacatcctcctatgtacatccattttgggatagttgagttaatgatagtactgacgagtgatgaaaagaatagctgttattaccacgaaatcatcgtcgacaatgtttggacacacganacacctttgtcctcgagttcggtgccttacggaccttatgacctgacagcggtcaccacaacgacactccggacgctcacgccacgtggggagtcctaagggatttacgtgccattctaaagcctcagcagcaattc

SEQ ID NO: 77967 - DNA, 389 bp, Oryza sativa
  unsure (1)..(389): unsure at all n locations
ataccacactaacatataatgtattcttcagcatctataaacttgttccctctttgagtttatttgagatgtcaatgccatttacagaatactccgtataaacctttcatttgtttctgaattagtaattttacaattcaggagagtgcatatatttatgtcattatttgttgacttgattctgtcttggccaatgagtgtcctctctggctttgatcatcatacacttgccacttggttgttnttttagcgcccatctactacggattggacaccttctaacctattctcctcttctatgtttctacctgaagtccaagctgatgagcatgcatgcatcacctcttctttttggcaggatgatgcttcaaaataatggattttacaac

SEQ ID NO: 77968 - DNA, 254 bp, Oryza sativa
  unsure (1)..(254): unsure at all n locations
aatgggagaagaccacagcctcgtgtatatctggggtcggaaaagcctcaccgcacgctggccgtcacccgatgattttcttggcagggagaacgccgtgcgccaccatctacttcaggttctcctccgtcacgtcggatggcgcccattggccttcaaagctttccttctctttcgccattgattttttccgaatgcgctgatttgattcnaaggatggctatggagaggtgatggatngaggcggtggatca

SEQ ID NO: 77969 - DNA, 266 bp, Oryza sativa
  unsure (1)..(266): unsure at all n locations
caccccagattatggtttggtagaggtagcacatgcatctttctaaaccatttctttgtaaaataccattacttcttgntttctgtatatctgnaatttagtattacatatatacataagtacatgctctatattggagaggtaatgaggtggatcatcattgtttatgcccttgctgtgccaaatgccactgggttaaatgttcccctgaagtttatacttcatttttaaggatacatgattgcttccactattctaggattttt

SEQ ID NO: 77970 - DNA, 390 bp, Oryza sativa
ccatgcatactcattgtgtgaatcttttccttcacatattcgtaccttttatggtatggtgaatttgcaccagtagctctactatttaaatgttcgcagcgaacgaattgattttgatcaaatttcatagaacccatgttataagttaaaggtgtaaaaaaagacaaatgctatgacgtgtggcatataaccataagttatatggttgaaatattccataaaactccacttttgactaattaatttcagcatatgtaaagcgatatgtttcaaagaagaagagtaaaactacttaaaagaattcatatacactatgttgcttcacatgtatatattatgaaattttacaatcgtaatgatgtcagacgatacatggacagtgtgcgaata

SEQ ID NO: 77971 - DNA, 299 bp, Oryza sativa
tatctccattaccttttgatattattatataatgtcacggatatccagcaactgattatcacatttttattgtgtcctctagcagaaacacgttcttacagtgggatccagcaaagaacgtaaactctgggtatcttgtagcaaaaatttcctttacaagaatactagcttcgagtctagcaatattattatttctcgtgatcaaaaagcttatagttagaggagcctcgcttactaagtggtggaatgtatgggtattgagaaattgaaagaattttaaccataacatcatctcggag

SEQ ID NO: 77972 - DNA, 374 bp, Oryza sativa
  unsure (1)..(374): unsure at all n locations
tgtcttttttcttacaaattgatcattttcaaatacttatttgtaaattagaccatgcaaaaaaaacttctacaaaaatataccgtgggctcacggctagtgacattgtcgccgaggttgcaaagattaacgccgctacattggcgctgaccccatatccacgtggagccaaggccgatcccctcaccgacgtggtatggcctcaacgccaaactatntggcgtagacacgtgacggagcgtggggctcctcaccgggagaccgcgcaggcctccctttgccggttcggccggaggccctgtgtgaggttctaagctcctagcctgtggaaagttcgcgagagtggaaacacacaagacacgggcgatgtatac

SEQ ID NO: 77973 - DNA, 284 bp, Oryza sativa
  unsure (1)..(284): unsure at all n locations
agaacttacatgcaaagagcagcctaatatggtttaaaggcatatctgggatgctggctcttttctgaatagtgctccaaacactaatgtatgccagtcaaaaaagactgtattttggaacatttatgtgttctagaggcacttatatttgatatttgatccagagcaaacaatttgtaattttatgcaactagcanaatgcacatacttatttggaaatatggtattcactcgattcaaatgaatattagactattacatactactagaagaatatcaatgac

SEQ ID NO: 77974 - DNA, 418 bp, Oryza sativa
  unsure (1)..(418): unsure at all n locations
tgtttgcaatctattatctagttggccgcgaatatttatacataataattacctatcacatggacacagcgacttatagtctgcattaacccttctcccctttacagagtaccaagccaaacataagacatatgtatgcatttgtatttcatagaaactatacaaggagaaaaaagaagaggggatacagaagcaaggagagcggcatggttggtttgcttgcgatatatacatacgtacaccatatgtatacgtacctanggggaggaggagaggtaagtgggaccgacattgtagtgtccggtttgctctaagattaatctaatctaacggtttataatattggacccaccaatttaagtgataatcaacgcatggatggtgttcttattctcagattctctaggaatatctctaa

SEQ ID NO: 77975 - DNA, 475 bp, Oryza sativa
  unsure (1)..(475): unsure at all n locations
cgctgtattcaagctttcaatgattgctnggaggtcgattctgtggaggaggtgtttgatgaaatgctcctgagagggctggtaccagacgtggatgtgtatagtgtgtacatcatcgcgctatgtaggaaaggtgaccttgtcggagcgcggcagatgatgacctgcatggagcacgccgggtgcccaccggatgtaaggacatttggtgtggtagtcgccgggtgcatgtctgccgcggacatgggcacagtgagggagttggtgcacgacgctataatgcgtggcctgcagtgggatccaccagcattgtctgagctgataagcttgctgcatgcacgtgatggtgccacacagtcacaggagatactgttggagccactatttgtgcacgatgcatcactgtttgggcagctgattggagcatcgtgcacgcaatggctattgggacctgctggtgtactagatgaatatt

SEQ ID NO: 77976 - DNA, 344 bp, Oryza sativa
ggaatacaaacttggtacttttgcagccaaaatttataaacttgccttttcttttcaacatcaaatactcaccttttggatgtttcagcaagtaataaatatttgcaaaaatagtatgccaacgctgtgcatttggctgaaaaaatacaaagttaacaacatttggaatagtaaatcttcgcttcatttcgagtatgcctaggctgtccacatttataaacttgcttttctttccacatcaaatccttcctctgttggattgtttagcaaaaaatttaaataagactggtgcgcatactttcaatgttatacatcagactatctgatatcttgtttctggactg

SEQ ID NO: 77977 - DNA, 473 bp, Oryza sativa
  unsure (1)..(473): unsure at all n locations
caagctgcactatatatctgagaactatgcagagaccactctgttcatgcagtgttagtagctcaaactatcttgcatttggttcttctttgctaccgcccttttagctgttcttgttgtctgcgtgtatatatgttcgctagaagcatatgatcctccacataacaaagttgttcctgcctctgttctgaccagtgagttttcttctcatggacaagcatcatgcacacagcagttgccgatctgaacattctgaaaccaaagcaagaacagagctcacacatcgcaatgtcgctgatgtaatgtcacacataccgatcatgtgtactttccggttttccctccaactactccttgttcaaatatcttctattataactaccaactaccctcctactctcgaccacacctcatttaatgaggtgaggggggatctatgtcatttntctttaccactatatatcccactcatt

SEQ ID NO: 77978 - DNA, 331 bp, Oryza sativa
tggggctcaccctttttttgttttttcccaagagagatatggttagagaacatcagggctgctctgccacatcaatccgtaagaacagactgcctcaaagtagttcagcagtgaatctattggcccactgtgctgaaagttgtgtctaccaaccataagtgtaaagcatgcagcgtgatggccgaaccaaactgcacctaatacgaggacaacctatgcaccagtatggctttcgccaatggggctagactcgttgcccatcctgtgcgagaaaggtacaagtccaattgaggcatgaaacttctccgctggaaaggccaaccatcgtcga

SEQ ID NO: 77979 - DNA, 482 bp, Oryza sativa
  unsure (1)..(482): unsure at all n locations
agcttacattctatttatcggaaganaaaatatcctacgcacggacttactaaataaaataaaaccaaaaaaaaaagtacttagtaccattgaaaaaataatataaaaaaataaaaccaaaaaacatacgtacatagtaccattaaaaaaattgataatctttaaaatagaattttctactatttagagataaaatatattacaatataaatntaagaaaatatcaccgtacaaacgctctcaagccgccatatggcacttttacaaccgctcctataccgccacatggcaatacctaatctcaccgtcgaattttacttaaattggtagacccgatacattagaccattagattagaatagatgtattttatctcaaaagaaactaataccttactactgtggccggaaaaggaaaaaaaacataagtattcattactccgtaagacatacgtacggcaaaaacaattaagctacatacta

SEQ ID NO: 77980 - DNA, 402 bp, Oryza sativa
ttctttaattcaatgctccactgttataccccatcttctgatgcagtgcaacagaatcccagttcacctccaagaattctttgccactatttggaccacgacactgatcaaattgctggcctgaatacatctccaactgttcaggaaacacctatctttccctgttccctgttcagcagtgcaaaatagagaagacatatgagaaattcataactgctacaagattgccccaacagaacatataaagctaaagaacaccttgaaactaaacatagaaaactttgatcaagcctggaaaacccttccattcaaatgaacagctcaactagtaatcctcacacagtggtgaaatttaatagcaaaccagtcccttcaagaaccactacatatcctctatctaaa

SEQ ID NO: 77981 - DNA, 312 bp, Oryza sativa
  unsure (1)..(312): unsure at all n locations
ccatctcttttaacaccccctttcttttttctatctcttgtgcttacatgtatatgtatgaaaatgaatatgctagtactagcctactagtatcttatatctaacctagctatcttctagcttaattacacatgtatctatctcatgaacatgctgcgtctaccttgtctgtgcttcacctcgaacttgatttcttctgtggccgaggggaattaatcacaacggagagatataatggataatactactaaagatgacaaatggatgtgtggtgcatgcaccaactancgagcagtgagatggagttgtgag

SEQ ID NO: 77982 - DNA, 449 bp, Oryza sativa
  unsure (1)..(449): unsure at all n locations
agcttaggtttcatagtggaatcctttcacgctggagagttccttagagataggagcaaacaatcaaaacaatatatggaatctgacacaatctgacttgcctctggctttggctattggctttgggctttttttccttatgttcccacaatttcacttgcaaaatatgaatttctttatgagttggatttttggtgcacggatgatctcaaacagggatagcttctgccttctcaccatctgtctccatcaatctgccccaattgttgcagtcaccatcaccaactcgngaaagccgttgatctattgacacaccctgactaaactctccttgcctgattaagtggcctctgaatatatggcattataatatctgggttcagaagaattcaactactcctagagatgatctcttggagataatgctgctctcggtagatatactccta

SEQ ID NO: 77983 - DNA, 236 bp, Oryza sativa
gcatgaaggatggaccaatctactactaacttcactgcatgctgcaacctcatgaataattatgataactactccgccagatattgtcgctaaggaaaatggggttgagaaacagcatcgtgttgaccaaatgtcaccagctgatggttgggagctactctggaagagcattagcattcacgatgataaagaagtgcacaatctgctagacatatggatcaagattattcagaaat

SEQ ID NO: 77984 - DNA, 473 bp, Oryza sativa
  unsure (1)..(473): unsure at all n locations
agctnaccataattacttagaatctccctcncattataaatgtcagaagaacagcaatgaccagcacctatagaaatttggattacaaaaggtatgatatatgcgtatacacactaataagaaaagcacaacacctgagtagtgcataaaatatgtacctttaggttgcttatcattttcacagttgacggattgaagtacagctgcataatcagctcaaaaatgtcagacaacatacaaatatatattcatggatgatgacaatagaggggtatatagaagggcgacaactatggcttcagattcacctgcatgataaattntangtaattgttgatggcatacagaagggccggaaccgctagtagtgcattattaccggcttgctacatatgaaaatgatggagagtcagatgatcagacaatgtcacatacagacatgcaacaagcactattattgtagaacataagta

SEQ ID NO: 77985 - DNA, 394 bp, Oryza sativa
  unsure (1)..(394): unsure at all n locations
ctatgaagatcttgatttattgtttctcacggctgtcatccaaatgttatcacttacaccatgatcatgacatcgttagcaaagtgcgaaaagattgaagaagccttgagtgtgtctcatagaatgaagtcatctggttgttagcctgatacactattctacaactccttgatcaaccttcttgggaaatcatgccatttgttctaggctttccaagtatttcgagtggaaatgccaatgaatggtgtgtcccataatctggctacctataacaccatgatttcaatcttttgctactacggtcgagatgatgatgctctcaatgtgctgaaagaaatggaagcacaatctngtaagcctgacattcagtcatatcgggcgcttcttagacttt

SEQ ID NO: 77986 - DNA, 431 bp, Oryza sativa
  unsure (1)..(431): unsure at all n locations
agcatgatgtggntattatgactaacttcaagtacgactggaatgagattcagctgctgcagtttctgttcaagaaggccaaactcctccagaagctgatactagttcgtcccataccagtaccggtagatcgccccttccgactccaggttcccgcaaatgtccagctaactgattgtgctgatgattctacagtcaagtcatttcattcagaactccttacctcgaagacgaactagtgttcagtcaatagtcgagctgcttatagttctacagatctggagcactaataggctggaaaagagatacatgacaagataacatgtgcagaaacaagtacagtctcgtcataccttgatgttctttttccttctggtttacttcgaaaaaggtgattgaatgactnggtatctcactgtcacattatgatg

SEQ ID NO: 77987 - DNA, 335 bp, Oryza sativa
  unsure (1)..(335): unsure at all n locations
aacggaccacattaaatttggaccaaagatattatctgaagcgtacacttagatataggaaaaccatataagcattcttcttaactaaaaatatttccatgctgctatcatactctatctttttatcaactctaaataaattcagtggtcccgtagcaacctatgtttgacaccttagtgtagntgtgagcagacttaatttctttttctgtggatcataggttttgcttacctagtctggttcttactttcagttcaacatcagcaacaaaagttttgggtgctagtacttctctgggctttgcctattaaatctgtactctttgagatattaa

SEQ ID NO: 77988 - DNA, 402 bp, Oryza sativa
  unsure (1)..(402): unsure at all n locations
agctntgagtcttgtttcttaatgttgcaatggcccaaattaaaatagagtatgtccggtacaaccagtgatggccctgaaatctacatgacaggacaaggaattatctggtcagatttcatatattgcagtgcaatcatgcacaaggaagaattctttgaagctaatgttgggtgcaaaagatgattaatagccgctgatcattgtaattggtgactcggttgaagagagccacattccatggccactaaattttgcttgacttacggtctaaagataaaatattcttcagacaaagaactcaaaatcccgcgttgatcataagtagtcaccgtctcaaaaaagaaaaaaaaaagttgaggcacactgattaggctcaactccatattataattccacttc

SEQ ID NO: 77989 - DNA, 456 bp, Oryza sativa
  unsure (1)..(456): unsure at all n locations
agtcttcaagtctttctcttattcttgggatccatagatgcaaggctattggttgcagctctccaagtgaaaaccttgactntttgcggtacattgcatatccaaaccaaattccatgccttggatatttcagcttcagaggaccccgacccattgtcaatagctgctagctgaagagcgagtttgtaagccgatctcaccgagaaaatacccaacttattcggatgccaggctaagaagtcttcctctgctcttgccgagggtcggattgtcaagatcaactcancatccactggccagaagatcctcttaaccacctgttcatcccatgtaccatccactcccattatatctgcaacccatttggttctacaattacctctcacagtaatatgtcttcgcgagtgattcctcggcagccacggatcacgccagattctgattgagtgaccatta

SEQ ID NO: 77990 - DNA, 355 bp, Oryza sativa
ttcttctttgttcctgctcccgacggcagcgtcgacctcctcgtcgtcctcaatatccgcctccgactagacgacaggcacattggaaaccttgcgggatcagatccaagcaccagggacagccttctgcaccagacgctatcacttcttcgacgcgctggccccctcgtctactttggcgggggtcacccaggcacgcagattaccatcatgcacctggtttgcccggacgtcaagctggcactgcaacaaccagtcatactccgcggttgttagaccgacgacgatcttgttggagcagctactgcgtctcaagcaacagcggcaaagagaaaagacaatacgctggtagcag

SEQ ID NO: 77991 - DNA, 418 bp, Oryza sativa
  unsure (1)..(418): unsure at all n locations
agcttgaaatactctatgatcgctngaatacccaacgcggaactgatgtcctggatccatcttctgtcagacattgcctcggccaccgagcgacgattccggagacgagcagggactgctgcatatacagccggcgctagcgaccgaatggaggaaccctgcagctagcaattctcccagaacagcactgaatttccatcccctaccaagcataccatggaaattgatactagattgcgctccttctgcgagaccggagtacttagcccttgccacggcttttccggtgaagatcttngctgctagagccatcgtgacctcagggcgatttccaacctctctagatcaggaatccccaaaccaccatactccttgtgcgagcaaactcgagctcatgcgacccaacagacgccgccgt

SEQ ID NO: 77992 - DNA, 461 bp, Oryza sativa
  unsure (1)..(461): unsure at all n locations
atcttgaactaccatcgatgcaagaggaaagctaagcagccttgaggacattgcagatagaattgtatgcgttgacacaaagcttaaacttctcttctgccacggcctgggcacatgtaaaacagagtatgcagttataccctctgtttagtgtttaccaacttaccatccgttgttttgcacattgatttgttacagaccaatcagtacattggctgcatcaagacaatgtcgtatgctgttgtttactccaaatcaaacaagaaggaaagggttacctgtgatgagcctgtgtgcttgtcatggtgccacctcaaagcagatgcccggatactgcacaccgaaagtaattcatgtgaacgctagtggagcacctacttgtagtgccatacagaaatggtagtgatagcaagacaataattcgaggaatggtacananattcacaacttacgcagttttg

SEQ ID NO: 77993 - DNA, 364 bp, Oryza sativa
attgtacatatatgtctgacgcgtgagacataattcatgaaagtcatcttcctaattaattgtgggacctcaatccttatcagcatgggacatggtatgcaaactcataaacatatgaggtttacgcctcatcaatatgaataccacaacattgctgctcttatgaaaacattgtgacaaattctaccataagaaggacctttccttagttgagactgatctggaacaagtatatcatagtggtaaccccaccggcaagcctaaagagatctctgtccgaaaaggacttacatcttctgccaataacatgcttaaataatcatcacaaatctgcatgatcacataatgttctaaggaataaaat

SEQ ID NO: 77994 - DNA, 307 bp, Oryza sativa
agcttatagaataatataacaatatttctaacacacaacacatatattatcaaaatatattaaatattagttttaacaaaactaattttactgtgacccatgtccccacatatgcatctgcatctatatatatcttcatcagtatatatatttgaagagtaaatttcacaaaactacaggcgcttgatctatttatcgcaaaactacagatttgacatgatgcaccacgacacttcagattcaacactcaatctatgattgacctacatcactaatagagcatttcacaaactagacctatattatc

SEQ ID NO: 77995 - DNA, 461 bp, Oryza sativa
  unsure (1)..(461): unsure at all n locations
tgcttctctttgtgcttcacatcgtcaagcggtcaaccgaataatgaggtatttgaatcatacacttgagtttggaatttggtattctacttcatcttctatatgcttaagtagatattccgatgctgattttggaggttgtaaaattgataggaaaagtactagtggaacatgtcantttcttggtacatcattgattgaatggtcttctagganacaatctagtgttgctcaatcaactgctgaatctgaatatgttgctgctgctagttgttgttcacagattctttggcttttatctactttgaaagattatggtgttacttttgacacagtacctctcttttgtgataatactagtgctatcaacattactaagaatcctgttcaacactcacgcacaaagcacattgatattcgctttcacttcttgatggatcatagtgagaagggagatgttg

SEQ ID NO: 77996 - DNA, 193 bp, Oryza sativa
ccgaaagatacatacgatcataagaatttctagtttggtccaccaagcgctttgtaacaaaatatgaagccgactattacgtaagataaacgagctaactcaaaaatatgttgagtgctttgcatgcgaatatcatgagatgtggggtcttaatcgtgagcatggtgagcatctgcttccattaaaccgggtt

SEQ ID NO: 77997 - DNA, 391 bp, Oryza sativa
ttcttggacttagcccgtgcagccgccgagccgtgtgtgccgctgccgattccttcgcccgatttgctcgattctctcagccgtttcttgaattagttgaggagatttgtttcccttatcctcctctatcttttcccccaaaaatcctattttatccctttgaattcgacgcgaatttggattcgttttcgagtttatctctccttttcccggcgcgattccatccgttcccgagccgatctctccctctttcggctataaatagcagctcctaaacctcctctttcgttttccaccctcgcccgagctcgccgtcgcccgtagcgccctagccgccttcaccctagcgccgacgccatcgtcgtcgccgagtcttcagccgtgccgctcg

SEQ ID NO: 77998 - DNA, 100 bp, Oryza sativa
  unsure (1)..(100): unsure at all n locations
ttcttctatcttctcttgnctcctccacttcacctcgttgcggngaagaagaagaagacgaggaggaatgtgtgtgtttgtgtaattcttccttttcttc

SEQ ID NO: 77999 - DNA, 436 bp, Oryza sativa
  unsure (1)..(436): unsure at all n locations
agcttggccattgngccaaagactgtcgacagccacgacgcggctaggcccacgttgcacgggtggaggagtaagagccggctctgctcctggctcacgcaagcatcgagctacctccagcggcaccggccacagcggctttcctccaccttgatgagccgaaggtactcgtctccctctgcaacggctccagcaacgacaaggctgatgggtggtacctcgacaccggcgccacccatcacatgaccggccgatgggagttcttcaccgagttcgactccagcgtccgaggctccatcaagttcggggacgccttcggcgtggaaatcaaaggtgttggctccgtcaccttcacaggctgctcaccggagtctactacatccccgcgctgaggaattctatcatcagcgtgggacagctggatgagaatggctca

SEQ ID NO: 78000 - DNA, 375 bp, Oryza sativa
  unsure (1)..(375): unsure at all n locations
tctcatccgtcacgtcgccatcgttatttactgactgtagtgcgtgagtttgtgattctttcaatgtctaagtttgcacgagtactgtgtaatgatatattgctatcgctacttccgtggcatgctttctttggttcccctgtccttcgttctgcaccataatcccatgttctttgttaacaaaaatcaccagagagaaatcgtccaccatatatgtantgagatgcgtggtcatggatgaggcagatcaaagtttcaggttcagtctggggaaaatcacttcgatataagctgagaattgatttccttctttgttcagcanaaattacaagtgaaagcagaaaaaatgatgctgtgttctaacaaagcatgaca

SEQ ID NO: 78001 - DNA, 450 bp, Oryza sativa
  unsure (1)..(450): unsure at all n locations
agcttaatatattnttcacagtgagatcttgatataaagggcagatttagcatatcaagtacataaaataatgaacaagatcaggtaagaacggctgaaactccgatactatctctaatagcaataataaaacaagctagatattataattctagatattacttaataggtcggacctaaccgatgcagcattaagcataaagagaagtataagatctaaacaagtcaatgaaagtctttcgagatggtagatacactatataatctaagtcaacgttgatatctaaccttatcggctggaatccactagtagatgttagccgattcaaggttagatagcaataatgatctagattatatagaatatatgataactcgacgaattacatcaacaagattagagtgtcatataaatggaagcactaatcccgagaacgcaagccgtcataa

SEQ ID NO: 78002 - DNA, 345 bp, Oryza sativa
ttctgctgggcttctactttctatgactgattaaaggagggacgcacagcatactctcggaaagagaggacaaaggctgcacgctgagaggagactgagccgagagtgagaggactcttcctaatccggcccgacaaggaaaaggtgaattataatactcttccattaaataatcactgcaagagcttgaattgtaaaatacttccatgctcaaataattcaaggaaatcctgaaatacttgacactcaaggcttaacaaaatataatcagacctctaatgatcaattaatattaaataattgctgactgctctctgatgataaaataatattgagctcgaaaac

SEQ ID NO: 78003 - DNA, 475 bp, Oryza sativa
  unsure (1)..(475): unsure at all n locations
agcttgatcttttgtttattttgagtgaaggacgaaaggaaacaaaaacttgattgttgatcatgagttgctactatgctgtatatcttaaaggtacaagtgcaaggtatatgtactctctctcaaattaaaaaatctttggcacagtggcttatccttatctctgattctcacgagacaccggttctccttgccttgggcggntgaaagacaacatcaattatagcaccaatcacccaatctttattcgactcttatttcggaggttttcaaatgatattgcaaaagatagccaatgtcctcanatgattcacttagtctctctaagtgtatcaatatgaatctcttaccatgtttgcctttttgattcctactctaaggtttgatatgtctagctcggtagggatcacacatggcatactcgcattcagatttattactaagttaataacgtagactaaagtagataactaaa

SEQ ID NO: 78004 - DNA, 420 bp, Oryza sativa
  unsure (1)..(420): unsure at all n locations
atttctagcatttcatttagaccatatcacaacagcaatcccttcctctttgagatgttttatgacattgtcagcattcttaatctatgaaccaaacagntcatgcctgttcaaaacaggtttcaaatttagagcacaagaaataatctttctaatcaatctatccgtgggacaagcaaagagaaagtgttgaattggttcttccttatcacaaaactgacatttattatcacccttcctccagcccctcttgaaaagaatgtcattctgtcaagattttattattggtaaagagccaaagaaacactctgattttaaaggtactttcgaacttccagatatttttatgaaggtaattcacttgcttaattttaagtgcactacagaaagatattacagtgaatctcccatctttggaca

SEQ ID NO: 78005 - DNA, 391 bp, Oryza sativa
  unsure (1)..(391): unsure at all n locations
attctgctatttgatctcctntacataatagttatacactctgcacacaggagataagatcaaagaaaaaaaaaacatgctgctgcatagcttcgatcctccccttcctcacacatataactatcagtctacatcacgccgtccaccgggcgcttcatcgatccggcagctgatgcccaccgtcaaccactatgctaggcagctcgctctccacgccgccggtggtcgccggcgcggtcaccgcggcggccacatgagaagcgccgttctcggcgctcgccatgtcgtcgccgccgtcgtgccgaaccaccacctgccgcagcagcagcccctgcagccgcagcaggtagctctgcccagccggctgcgacgacctcacgtaccgcgccat

SEQ ID NO: 78006 - DNA, 183 bp, Oryza sativa
aaaaaaaacgcccggccaagtaagagtacaccattctcctttgttcttaacagaaggagcattccgagtctctccccctgctacgacccctttggtcaatgccaaccgcgagacttctgatatttgcctataggaatcacctaaaggacaatgttgaggtctgaccaacataattcttgcgct

SEQ ID NO: 78007 - DNA, 448 bp, Oryza sativa
  unsure (1)..(448): unsure at all n locations
ttcttcatttgcgaccatgatcaatgtataatttgaagagatgagttactatacgttgattagatagcaggccaagtttaacgagatgggaatggattttcatgatagcatagatatttgaacattttgcacaagccttgagaaggagcacatatgttctgtaatcatggcagaaagcagtgaaacgaagcatactgttgtaatctgtcagtgacttttccggagatcctttctccaaagaagctcggaggatggcattattgtatggaaagatggctctaactggatatctcctcaaacagtttgtgtaggacattgtgcaaataagcttctcatatgcgatcactacaatgcagacacaaaattggcaatntcaccaggcaggtaagtgtataaacattttctgcaacctaatgtaattcacagaataccattcacgagacaacga

SEQ ID NO: 78008 - DNA, 414 bp, Oryza sativa
  unsure (1)..(414): unsure at all n locations
ctctctatcagatgataccctgtagttcatttcacagnttgctttctcttcttatgccagaacaagaaacgcaagttcatgatggcatgatcaccacagaccttgtgaaatgtgaatgtgaagaaacatcaggcgccaaattgcatgctctgaagaatcaactagtcactccagctatcctcatcatcgtcatcagcaacagcctggttgattacaggagagagaataatcatatgaccatagatgacaaagctatgatcagctgaaactggtagggagattaataatgttgcaagagatggtttataaacctggcgaatagcattagccctcttcaggatggccaccactttgcagttcgctcttggagcacccatcatgttctgtctctttgcaagaactggcttcaagttg

SEQ ID NO: 78009 - DNA, 405 bp, Oryza sativa
atcttgagcttcttgaagaaagaagaaacctgtgactctgggcacggcgcagcctctatgcaaggtggtatgatctctggctgctctatccacaccttgtgccggacaccaacaggttacagcttctcagccaggttcttcagatgtgtctctcctttcacctccagtgttacctatacacaaaaaaggctctcagcacagctattgatgccacatataacagaatgtaaacgatgcatgataaaagtagtacgtactactgcagttgctttttcgctcgggatacaacttgtagccggaacaaaaatcaattgtcaaaattacactcatccagaggcatgagttgaatccggcttcgcaagaaactactgggacacgttacagtatcagtactctctgtaatga

SEQ ID NO: 78010 - DNA, 376 bp, Oryza sativa
  unsure (1)..(376): unsure at all n locations
gactaattcgcgagacgaatattttgagtcttatttctctatgtatttgacaatgtgatgctacagttaacattngataattatagattaattcggctctaaaaaatcgtctcgcggattatctcttatttatgaaattagtttttttattagtctatgtttaatactctaaattagcgtccaaacatccgatgtgacatgggctaaaggcctctttgtttatgcttatataccaacttataaggcgaaaagtctaagcctaaacaaataagcggcttttttgtttggcttttctganaccataagccactctaacactattaagccaaaagctaagttagagaacgtntttggcttattaagggagatgcatgac

SEQ ID NO: 78011 - DNA, 502 bp, Oryza sativa
  unsure (1)..(502): unsure at all n locations
aatcagctcgacccggatcttaagtcacctgcggcatgaagcttgatatctcatgtgatcagaacaacctctgcaccttgcttgtcatctactcatctagcatcaactctacacggcacacacaatgtgtccaatacaaaacgtgtatctataaaaaaaatgccagctatagaggtgaaaagtgaaaacaattgtgtatcactttaccaggtaccaactgaacatagatactggaataggtacataaatgcagtaacccagagctcagaagatgtacaaagtttaccaattatgtgacaggtacaaacacagatctcatgtaattgatgccatcatatcacttggataactcatatttaatatgttgtagcactctttgctgctaccttaccangtgcaatatgaggtagtcatgcatatatacacaaaactgagcttgcctcgtggggatatagaatgttccaagaagaggcaatgtanatttactcttaatgcataatag

SEQ ID NO: 78012 - DNA, 291 bp, Oryza sativa
cctcaatagttcatatgtgccaaccacatagaccgatctaaacacattcagttatattgtcaagaataaactaagaattgatgaaattattcagagaataaacttgcttgttagactaaacaatatgatcagaaatcgtgaacgtatggattttacctgctgcttttgtaacactctggggcagaataaaagctgctggccagttctggatcagctgaacctgatgcaattagccttgaaacgccgcaatctgccaatctcggttcgaaatcttcatctagcatcacattc

SEQ ID NO: 78013 - DNA, 289 bp, Oryza sativa
caacaccgaccggacccaagcactcagatcagcaatctttaaactgaatacacgagcggctccaccaagagagccagctctcttgcgtactacgcctgaaaagccaaagcggaacacctctgtacctgcacctatcatttccggcggaagcaataatccccacagaaggtttaacaaagcagaaaggcaactcacatgaccctcggacgttttggaatagacgtcaaaattcaaaagcataactgtggacattcgcaaaaatagtcttcccacgcccaaagaatggaga

SEQ ID NO: 78014 - DNA, 419 bp, Oryza sativa
acatagatatcgatgcatatctgctcttgatatcatatcagacgtatttgttcttccatacagcgcatcgactagtacaggcaaaaccaattggtttggtaccattctttccgcggatacaaattttcctgctctgcatacccgttcatcaaattccatcacgttaccgcatgcctttgggtatatagtatatggaataacatatgcctcgcagatctggaagatgattgcacgcatatcgtcgatcagaactatataggcgtaaattgcagctaattggtccagatgatcaaacttgtctacacagcaacatgcagggttctggtgacgcacttcgctgaattggttgtcttgccacaagacttgagaacaagggttacattgatcagttgagaagttctccaatgcacaatgctcga

SEQ ID NO: 78015 - DNA, 403 bp, Oryza sativa
  unsure (1)..(403): unsure at all n locations
agctntatgttctgtttagatgggactaaaacttttaagtccctatcacatcggatgtttgaaaattaattataaatattaaacgtagactattaataaaacccatccataatcttggactaatttgcgagacgaatctaatgagcctaattaatccatgattagcctatgtgatgctacagtaaacattctctaattatagattaattaggcttaaaaaatttgtctcgtgaattagcttttatttatgtaattagttttgtaagtagtctatatttaatactctaaattagtgtctaaagacagagactaaagttaagtcgctgatgtaaacaccaccttcaacttgcacactcttctctcgctcgcagctagctagtttgtcctctcctgtacgcgtctc

SEQ ID NO: 78016 - DNA, 447 bp, Oryza sativa
  unsure (1)..(447): unsure at all n locations
gcttcccttctcacggaggtattcacttcttccttctgatgtctttcttggtggttacaggctgcatgtggtaagtgcatttcatgggaatgagataagaagcattgttataagcttacaagcatttgggttcaagctccgactccctaagtcacattaaactagaggtctggtcaatgagctctcatctacgtcaaagatagtacttatatcctctgctagacctcaaataggtttgaatcatcattatcaaaacttgtattgtgtngattcagctagatagactagtatcaactgctacttgattangctcataatttgaagatgtatattcctgcaattcanggtttacgtgctaacagtaagttgtcttgaaactaacaganatcttatatttaaactaacagaacttctttcgcatgaaagatgagtagaaaaatgttttat

SEQ ID NO: 78017 - DNA, 354 bp, Oryza sativa
cgcgagcaaggtttgtacaactattcactaagcgcacatggaggccacaagactaagattggaaagtcaagaccaccctaaacacagccatcactaaacaatccgaaacacacgcgggaatgaccacagtgcatcggaaaaccacaccgaaacagcatagatacagaagcagtgagacaccacaagattgacaaactctcgaggccggcagacaagcacccaaggcggaagcagaggcatcatcaacccgccgacttcagcaatgaagacggcgcccgcgccgacgagcccccaaaagaagcaccggacaagcgcccccaccgtcaagccgacgaggcgcacagggagccccac

SEQ ID NO: 78018 - DNA, 364 bp, Oryza sativa
  unsure (1)..(364): unsure at all n locations
ctctacatggtggatggcagcgatggcccctgacatccttctggttatcttggctaggttctttgtgataccagctactccatttcatcaggtggcatgagagctcctgatgcctcccaggccaacatccatggtgcgtcatctgctccatgaaatgttgctcatatcgaaacattatatactgaaacttgcccaccgtcatgccagttgtaaatcgtcagcaaaaagaataatttctcggaagatagaagtgatcgtcaccaacttagcgatttctttatgggagcanatgcttgagtacctctaattaatgcactttctgctggtataggctgatagcgaacattaaagagtagccatgttc

SEQ ID NO: 78019 - DNA, 412 bp, Oryza sativa
  unsure (1)..(412): unsure at all n locations
agcttggatgatgacaaacttgtgaggaataccaagctcacaagtcacaggtcaaaccggggagtgacgcgatctccaactccaacccgtcgtcctctcgcgccggcaccgtgaaggcgtgaagcgagggcagcgggtgtgtggactgtggagtgggaagtgtgtggtgttttctcgtcgcgtcgcgctcgatcggaggctgtgcagcggggttgcacgccgtggacgatgatacttttggttgggcctattgatgatattgtcgagagaattggcccgtggagagcaagacggngttcggaccgcggttctcatggcccatatgcattatgatgacatcgtgtactatactactgcttgtgactttgattgtgacttcttgtattgacttccaccgaagaaacatgtacta

SEQ ID NO: 78020 - DNA, 389 bp, Oryza sativa
  unsure (1)..(389): unsure at all n locations
tatgaccgctctactcatagaccaacgactgttacttattaaccagntggaaaagaagtatgaaatatgtcactaaaccaatcaaacacacatgattcagctgccgggtactggcagtacttatgctccagttggccagtatatagagtatgacttaagaacctacggngtacatcggatgtaatggaacaagtgataagcaggatccatcctcctacgatcaaattacccaatctctacagatagcgagatgtagaacgaaataaatgggaaaaaagttattgccgacactgattcatctcatcatagtttcgatcaaacacttgcanaccagcacgagtgccccattgcagcgaatacacggaggagaaggtggcgagagtgacaat

SEQ ID NO: 78021 - DNA, 254 bp, Oryza sativa
agcttcctagaagattcactccaaaatcttcatagactgcgaccaacagtcaagctcacaaaggtgagttctttcaagaatgctctgcaggacaacatctttgctaattaaagccaacagaactcattaaggcatagccaacctgccttgcagctcatgagagttgtcggtgacatgggaccgggagtatcatgacttatagacttgaggcagacacgatcacccacgcggcctaaccccctcggggggggggg

SEQ ID NO: 78022 - DNA, 440 bp, Oryza sativa
  unsure (1)..(440): unsure at all n locations
actcagcttgcacatgggatccggatgtgccttgtaattggcggtctatccgtcttctgtgtgcaaatgtcaaacctaatttgataatgccaaagcaccgatgtccacactagagatgtttccatgcatgtctcgctattttgttttttatcttatggattntaatttaatttaccaagttgttaagtcagcctgctggtcatgccgatcatgatcgataatcctcacagctagaaggttntaagtgatttttggagtattccttttggtcngtgtgtntggcacttcatcagaattcctgaattttgaggtcaataattngaatttaagacaatacttcactaatttcagttaaagatacattttcaatattaannattgtataattgatttcaaatggtanannatggtcaaacttgtatttatatgccatgtatatg

SEQ ID NO: 78023 - DNA, 339 bp, Oryza sativa
tcactcgacccggatcttaagtgactgggctgcactttttagttatggctgaacgacgttggctggatactactgctgcccaattggccatacctgcatggccgtcgatcaacgacgctgaaagctgggcattgggatatggcgcccatgaccaccgtgctaagcgccggaaccggtgagtcataactgcgcaaactatttgacgcggaaggcatcttgttgaattggatgacgccggggatattgtggtaatggttaacgcgtatatcgccgtaattttttatctttgtgaaatggaggcttgttttgataacacatttaagtgacatgcgcctggca

SEQ ID NO: 78024 - DNA, 408 bp, Oryza sativa
  unsure (1)..(408): unsure at all n locations
agcttgtatatggcaagtntcttaagggtggtgagcttctccaaggcttcaagaggacgcagctgttttggaaggtccactttgctagcttctttatgtggaccatgcaaggcagtgttgcctctctcctcggctctggtggttgtagagtgtctgatgggcatatctcgtggctgctcccggtcttcttcttaagttgagcttccactgatctcaatcccggaaagtgtttgtagagctaccacctttgtaatttcctcagttaatttcaatgctgtccgcttgcttttgttgccaacaagtaaatgggtcattcgctgaagctttgcaatgatgtaggcaactttctgacatttgttcctaatgtccagaccctcagaactccaccctcctatattcttcggatct

SEQ ID NO: 78025 - DNA, 327 bp, Oryza sativa
  unsure (1)..(327): unsure at all n locations
ctcgtcgaaacaaacgaaaggtaaagggtggcaatgcgttgagattgtattgaactgtgcgttaattgattacatgnggttgggctactttaatacctaaagtacacaatatgttcttgtcggacacgactcctaactctattacaacttaggatacaaacaagtccctaaggcggacttttaccgactcaaagtataaggaaattacaaaaaatattctaattaatagatacaattgtcttcccaggactcaatccatgcgtggcaatccatatgaagcacattaacccgatccgatgacgtatacccagtcatattgtcggaatc

SEQ ID NO: 78026 - DNA, 417 bp, Oryza sativa
  unsure (1)..(417): unsure at all n locations
agctttatttgattngcttgtgggcacagagtaggattccaaatcagaatggccaaccagttcatatatgaagggcacggctaaagtatattttaataaatggcctggaacaatttttttttgacaccctaatttggaggtccgaaaacgggttccaaaatttctggacaaactatgctttcggaagagctctcctgcttggctcagtaaaagaaacattgctataatgttatacatcatgaagtacagctattctgtatgtaggtgtttactttaatttgagtatgcatttattacatttcaccaacatacatgtgtttagttcctggaaatggggagaagttatggaaagatggtagtttggaaaaaaagtgggagtttatgtgtgtacgaaagatttggatgtgatgtgatgtg

SEQ ID NO: 78027 - DNA, 390 bp, Oryza sativa
  unsure (1)..(390): unsure at all n locations
acctttaaactcagcttcgcgaacactcatcgatggtggcagcgtataaacattctcttctcctagatcctagacgacatgcagatccctcgcaccgagntaaagccgagtaatgcgccctttcaccgagtcatcccagggctatctgcaactccactcgggcagatcactcttccgggtaccttcggtacccgggaaaactatcgcatggagaacatctgcttcgaagtcgcttgattcgagacggcataccatgctatactcggacgcccggcgttagccaagtttatggcccgtccgcactacacctacatgatgataaagaagcctggttctcgaggagtcttatccctacgaagcaacattaagcaagccgtcacatgtgacaag

SEQ ID NO: 78028 - DNA, 414 bp, Oryza sativa
agcttagcttgccgctgccatttaatatgccgtcaccgatgctgatgatgcggatctctggcgaaagattttcacacacatctctgtaccaaaccaaagcatcaattctttttgttctgaattggctcattttttttaaccgcaaaaaaggagaagaaaatagtaattcgtattttttccctttttttttggctaaaagaaacactctatctctgattcgctgataaaaaaggggagagctcgtgccgttgtgcgtgtgtagcatttgtgttgacgacgacgaggtcggtcgggggcgacgaacgggtcaatccgagccgtccaatccccgcacgcgtctttacttcgccttcgtctttcctctttcctttcacgagccgcgcggcgcacagagcgtatgctgcaccttctttt

SEQ ID NO: 78029 - DNA, 445 bp, Oryza sativa
  unsure (1)..(445): unsure at all n locations
tctnctcatcattctaccactggatcagctnctttacaacccactggctttctgcgggctagaagttctgctccttcangtcactttctagcttacatgttaagctcaacactaatcagaactngctgataattaaccatagtcattatcattctttgtgctcgatttatggccttacattatntttatgacccgtcatttgtttctaggcattcgacaaccttcttcaccacaggatttggagctgctctgaatattgaaactctagttgccgctgcagaaagaagagatacaccgattgaggtttgtttatattttggtgtgaaaccgtgaattgcagcaaaggtccacacttctcaaactatttaaaccggtttgggggcctgactgacttangaaatgtagtgaaaccttaaatcctctacgagaaaatagtccattttac

SEQ ID NO: 78030 - DNA, 242 bp, Oryza sativa
  unsure (1)..(242): unsure at all n locations
agctntagatactgcaaagaatgtcagtgctgcaggagttatattctatctggatccatttgtcattggattccagctgaatccaactccaatggatatgcctggacttataataccatcatctgatgactctaaggtatgacagccaaagcaagagtcttgttattactcatcccttgctgatatgaagaanattaacaaatgtgatgcaacattcttaggtatttctaaattattacaat

SEQ ID NO: 78031 - DNA, 473 bp, Oryza sativa
  unsure (1)..(473): unsure at all n locations
tgacttctcattcgctattggtggtgacggttatctaacatattctgaaacaacaggtgatgacccagaactcaccatcctagaccctggtacagacacaatccgaacagtgtgttccacagctaagtgtgcagtggttatcatctctggtcggcctgttgtcattgaaccatatcttccaatgatggaagcgctcgtcgcagctcggcttcctggaacacaangacaaggtcgtgcagatgtactgtttggtgactatgggtccacccggaagcttccacgcacttggttcaagtctgttgaccagctgcccatgaatgttggtgacctacactatgatccactcttcccttctggatttggttcgcaatanattcatcgcagccagcgtaagtaatttcatcaatcatcccactaatgcagctcaaaatctaatctagaaattgaaagcacactagtcgaataatgcttgt

SEQ ID NO: 78032 - DNA, 431 bp, Oryza sativa
agcttgattagagttaatgagaggcagagcctcttgagccttgggtgttgtttggtctgccagattttcccgacggtgacgacggcggcggcgaggccgaggtcgagctcgtagccgtgtggtccggccttgagcaccatgttctcttcccccatcacggcgaagttgcaccgctccatcctgctgccgtcggcggcgacatgctcatccacctcgagcagctttggcagctgcgccatgtatgaggagatgaggcgggcgttcttgccatgggcgaaggagcgcttcccgatctcggtgatggcgacgcgctgcaccagcttggccgcgcagagcacccagaggacgccgaacagcgccttcttgccggcggcctggaggttgaagaagacgaggttgcccagccaggcgacgctggtggcgtgactgat

SEQ ID NO: 78033 - DNA, 367 bp, Oryza sativa
  unsure (1)..(367): unsure at all n locations
gtattgggcatacgccatgctcacactgctntaacagatgtgcttaagttcctagaagacacatggtttcaccacacctggaaatatatggcatatgtggtgttaaatccgagtaaataaactcataaaggatntaccaaccacctagaaaatgaccacaatatataatcagcctaagccataatattggtcaataaaaatgcacacttacgtggcgaagagcaatgatattgtatctaatcaattgcttaaaaacccaaacagcaccttgacttatatataaaaaagtcagcgggacagctatataaagctntactgtntgacaccttttaagatgcattgaccaactcctaaaaaataagtaact

SEQ ID NO: 78034 - DNA, 396 bp, Oryza sativa
  unsure (1)..(396): unsure at all n locations
atgcttctcttctctttntgctgaccaacaacaatggcatttcttgacagcatgaagcttaccttccccatacctcactttaggcagccggacagtttccataaaaaatggcaaggagcaatccgcttcctgtcaaagattgacacaaagagagtgacatgcatcagctgacataatatttgactccaaaaaattgacctttgtactgcttcttttatacctatgcaaggctggttcaggtctccttccccgcagcgcttgcagcccttctcgccgcacaatttcttctggctaagatcacacgagaagagactgtctcaacanatcatacgaaaactatgaagaaatttctctacaagtcacagtatgataactatggtacctagcattcttgat

SEQ ID NO: 78035 - DNA, 424 bp, Oryza sativa
  unsure (1)..(424): unsure at all n locations
agcttattgatgtttgcaaaggagccactgaaacaactagtattactccactttcttcgtttcaattctaagttgctagactttggaatgggagaatagacgctagtgatcattttggaatggagagaatagacgctagtgatcagactgtggatgagaaggtgatggtatacgctagaaaaaagaagaacggattatttcttttcttgggaattgcgtagagaccatactatcaaccatgctgttgtactatatgtgagctgtatggtattactttggctgatttggcaaagttttggagccagcggcttaatcttctattgatcttgctcttaggttggattcttttgtggtagttatgaactccttccctaaaaacaaaacagaggatntacgcataattaattaagtattagctattttt

SEQ ID NO: 78036 - DNA, 337 bp, Oryza sativa
  unsure (1)..(337): unsure at all n locations
tcgacgcactaccacccacctactgctcatcaaaaattctctcaataatatgcaatcctaagctctagtagcatgtatagcaaccactggattccatccaagattccatatatcgcctttgtccaacaggtacttgactgccgacgcgcatngcatcgcatatttgcatggcattcacaactgaaagcggcatgagatataatcttatcttttcgccaatacttatacttatgtnngtaaattanattttaaaacttaattntaaaagtaatttgtggtttttttatcatagttacttggtttgagaactaggatantatatcaaagtctactacat

SEQ ID NO: 78037 - DNA, 426 bp, Oryza sativa
agcttcatgtattatctattatctcgttttatgtgtatattgtgcttgacgagtaaaattgacttaaggctgtgttcagttccacactaaaattagaagtttaaaaaaattagaacgatttaacggaaaagttgaaagtttgtttgtgtagaaaagttcgatgtgacagaaaaattgaaagtctaaagaataaaaagttgaaacctaaacagggccttacaaattgtctttgatacgatacatcgatggtcgatttggttcctgcgtgactacaacttaaacagttgttagggctgtacgatgtaaattcaaatgcccaaatttcaacaggacaccgttagggctgtagcaagactactgtaacatttaatctggaccttcaacggaaaaattggatgactggatcgcgtgcaatctctaacgtgc

SEQ ID NO: 78038 - DNA, 483 bp, Oryza sativa
  unsure (1)..(483): unsure at all n locations
agaggagggaaaagaatcaataaagtgtattcacagggtccgagacaganaattggacccgtanaataaanaatggaatgcgctactgtgtgattagctcatcatttttctagtataaaaaaaagttctgggtctcaaatgtcatgaagaaatatgaactactatagatgataatcattcagcgccatataaatcgagacatgagatgtacttacacatgtacgtacgaccagctgctaattccattagctagtactacttctaagtctaatcaatacatcgggagaaaatgcagcctgtcatacataaacattctgggctaatagcctangaacacacagtacagtacaaacatttactggatctactgaccatctatacgcgtacgtaattgagatcacaaaaccacggatttcctcgtggtgtacgtgtacatagttggattaaatagcctggattaatctcatcaagacatatgtacca

SEQ ID NO: 78039 - DNA, 420 bp, Oryza sativa
  unsure (1)..(420): unsure at all n locations
agctttagttaatttanaaacatggttgggaaaatcaggattttcaaaacctgatgattgtttgacataaacttcctcctgtataaaaccatttagaaaagcacttttcacattcatttgatacaatttaaaaccttttgaagcagcaaaagccaacaaaagtctaattgcctcaattctagcaacaggagcaaaagtttcatcaaaatccaaacccttcacctgngtaaaaccttgagcaacaagtctaactttatttctcacaatcaaaccatcctcattttgtttatttttgaaaacccacttgattccaataatattttgaccaggcacttggttccaataatattatgcccagaaggtggttcaactaaagtccaaactttgtttctctcaaaattttcatgttcttcatgcatg

SEQ ID NO: 78040 - DNA, 375 bp, Oryza sativa
  unsure (1)..(375): unsure at all n locations
ctactgaattaaatgacaatattangtacctcacatgatgtgtaccgtcagaacatttaaaacaaacttgcatggattcaaaaccttaagctgcttttcatctggcaaaataactggaatattcacaaatgaacagcaacaaactgaatttcacgatcttagaggacacaaataatgaaggtgtaaagtattcaattaaaaatatatcgtgctgaaaggttgaagtatnntttttcagagcaatacatgcttaaaacatgacaattcaagagcaaatggcatccgatgactnntggttctaattaagcagttactggattctgttgaatgagctgaacaatctactacagactctggtgcataaatcatgtaagt

SEQ ID NO: 78041 - DNA, 381 bp, Oryza sativa
  unsure (1)..(381): unsure at all n locations
agcttgtatatagatgtgatttangaccgaccatttttcagattccagattcatttcatttattctgtgttagacgtcaatctacttactgcagattgatcacaatttggagtaaaatgtattgccacattctgcactgaccactgagagctgtaaggattcatataatctttgctccatttttatatctntgttataaggataattgcaaaatttgttcttgcactcgtcatgtgatgctgatgtgcagcagcactggagcttccacatgctaagtgaatgcggtcggctacagataggcatcaattatatatctgaagttctgaactgaaggccctagaatcaccatatatggaatgatcatcaattgaagaatgcagt

SEQ ID NO: 78042 - DNA, 403 bp, Oryza sativa
  unsure (1)..(403): unsure at all n locations
agcttgttatgatcttgtacgcactcatggtcaccccatacagcatcatgagaatctacgctgcggtaaccatcagggtggaagtaacgtcgcattggtgcaccggtatgtttccatgatggatcgaggtttctccaatattcttctggtgctgcctgcacaggcaaaggaaacagaaattatgaacctcgtgattaatcatataattacagaaagtgtagaatggttaaatatttttggcattactcctctatactgtacatttcatttgcaaagcagattttagttcttactgaaaactaaaacaaatgtgtcggcttattaagccctttttgggtaatgcctaacaacatatcgtcaaattacaaattntgagcagataactgcatgctgcacatggtgg

SEQ ID NO: 78043 - DNA, 414 bp, Oryza sativa
  unsure (1)..(414): unsure at all n locations
tattcacatttcttcaacagatgagaaacaaaataatgtatactctctccgtccctaaatatataagggagtttagtgggatgtaacacatcctagtataatgaagatatacttctatccagattcgtcatacaaaaatcacttatatttatggacggagggagtacaaaattacaaatcggcaatattttactactaataatgtttactttatgagcctttaaacagttgactgttcaacaaagcgcatcanacaattcaataattcatgaactagtatttgtatctataatggagtactaagcaagatcatgattcatgaactcatgatgtgtcacctagtccagcagaaatgaaacggagaaatgcagctagaccatttgacataatttaaaaacttctggtggaaaagat

SEQ ID NO: 78044 - DNA, 352 bp, Oryza sativa
attaggcttgtgaaacgattcgtgaaactagctttacgcacataaaccaacagctatactttgaatacctctatcatatgctttgttgttgaggtggctcgcagaatacggctggtactcactcttgctgttaaaaattttaatcactggatggcaatgaaactaggaggatccctatgcttatctttaggaggatgcacacgatgacggcgctctgtaggtcttagttacggtcgttgcctgtggcaatgacatggccgctgccttatatatatctgctttggcatgtattccggaccgttcggtcctatgttctattcaatgcctgcgggcctatgatgtaataatttat

SEQ ID NO: 78045 - DNA, 402 bp, Oryza sativa
  unsure (1)..(402): unsure at all n locations
nttcgccgatcagtgcaatgggttccgtctncggcatctacgatctcgtcttcccctcccggcagacgtttcggttcggcagcctcgacttcgtcaccaacaacttcggcaagatctctctccttgactcggagtcgaaccagtcgggagagaaccggatctcagtcccgtttggattcccaaacgcggctgaaagttacttcaagaccatctcaatcgagtcggcttcaaaccactcggctgagatcgcatcttctccaacgtcaccagatcaagatgatggggcttacccactgatcctgatgaagctccccgacgatttggcgggcgtctccatcacgacagcgtctccttcccgtaggcctatgcggaagtcggcttcaacaccgatttcgcctagct

SEQ ID NO: 78046 - DNA, 403 bp, Oryza sativa
  unsure (1)..(403): unsure at all n locations
tagctttgttagccaatggttgccgtccgacgtgacggaggagaacttgaaggagatggtggcgcacggcgttctcccagcaaaggagatcatcgggtggcagccagcatttggtgaagctttcccaacccccgatacacacgaggtcatggttttctctcacttcttctatggcggatttgctcttccaacttcaaagtttttccgtgggatcttaaatttctatggaatcaatctgtatttgaatccaaactccatagtccacattgccaatttcatccatgtctgtgaagctttcttgggcattaggcctcattttgccctgttccgccgaatcttcttcctcaagccccaaccaaacaagaacaaaccatgcgtagttggnggggctggatttcaactg

SEQ ID NO: 78047 - DNA, 451 bp, Oryza sativa
  unsure (1)..(451): unsure at all n locations
tcatcgtgcaatatggactggtttcttatgagaaaagcaacgcccctatgccttcgccgacaccctgctcgagcagcatggaaccaaacgttgcttagatatgcagagttcttcagcgtgatgtccatgcgtacatcaaatggtcaagcgtcgatacagtagaggtgtcttctctntacagatattctttaagtgaatgcttatcagagattatcaacaatcaactactcatcatgtntgcgagtgtcattcaataagacgatcatgaataagtaactagatacagcgagagcgtggtactttgttttcgtgaggaggtattgatgtattgtcgacatgattntctgaagaanaaaacattgatcataagtacgaaacatattgcattaattntccagaatagcttggtaatacttgacaagtactaatcttctatctatctattatatac

SEQ ID NO: 78048 - DNA, 419 bp, Oryza sativa
agcttgctgttcttcttgtgaacgaccaccgggttcgccagccactccggatggatgacctcgcggatgaatccggcctccagaagtcgcgccacctcctcgcggatgaaggcttgacgttccggggcctggcgccgcactttctgccggaccggccttgcgcccggccgtacggcaagacggtgctcaatcacctccctggggaccccgggcatatccgccggtctccatgcgaagacgtcagcgtttgcccgcaggaaagagacgagcgcgtcttcctatttgccatccaggagaccaccgatccgtgtggtcttggacgggccgtcgcccatggcaacctccttgaccgggacctcatcgcacgtgactatccgctgcctcggggtggcgggggcggatgtgccaagcctctcgtc

SEQ ID NO: 78049 - DNA, 326 bp, Oryza sativa
cagcttggggggtgtgtgacggtcattatcgacccaatttgaccgtctatacttcccaattaatgaagactagatatgcttgcaatgcaaaatttccaaataaaatatctactcccactatatactatgctactaacatgtatgcaggagaagcacatattaatggaggagaatcaacagaaaatagacgaacgatcaatcaaacgctgtcgagaagcagacttgtagatagatgggctcataacacagaattaacacgagcaaacaagcccaaaattcacaccactgggctgaggatccaccgagagatacacctgccaaaaagt

SEQ ID NO: 78050 - DNA, 420 bp, Oryza sativa
agcttattttcttttctttctttcaccatgccccctttgcctcgccttacctgctttatcaaattaatgagattactcaactgaaaattgttcatgtacagtgcgacagagcaggccgtcctgaggtgccggtagcagagggcagcgctgagcctctcaaggtaaggtatttacatgttgtactccatttcacttactactactccactctaattgctaattatttcttcattctatcatttcgcacatatgtatatgcatcagtggttaattaattgccatattatatcatcaacgcttttactgactgaatcattctagtcaagctcgaacctttcctgcacttttacatctcctgcagcttctatatttgtgcctgttttacatgcaaaagtgcacttctcttttttttcttttgac

SEQ ID NO: 78051 - DNA, 420 bp, Oryza sativa
  unsure (1)..(420): unsure at all n locations
agctntagacttttaactctcaagagggttgggcatctttattaacttttaaagaaccaagagttacagtacacataaatatgtaccaacattcaaatttcaaagtgatattttgctctctttttttgtgatttcaacaccacatcacagcaagaaaatgaaaaggatattgattacaccaaagctaagtgaaatagtgaatacatgatggcgggcgatggaatgttagagtaatatcgtgtagtaccagatctgagaaggtaaaacaaatacttatattgtatagatgcatcagcaaggtggacaatgtgtggagttctagtataaatgtatagaagctagccactggatatcaaattcatcacctttcttgcctgtagttccacttgcaaaatggcaatgttcctctgtacaacagtc

SEQ ID NO: 78052 - DNA, 270 bp, Oryza sativa
  unsure (1)..(270): unsure at all n locations
actgtgtcagcttgtctcanatggaactgattagcagtgttatcctgattaacctgcatatgatccacaatatctgcttgtcttgactgagactgggtggtaatgtattcttgtgtagtctccatttganatatggcgtctgcttggctcgacggcaacagatcgacagtgtttcctagatcaatctgtatttgatntgcatggcttacttgtgactctgactgttcagtaatgtattcttggtatagatgtatttcattgaaagagtct

SEQ ID NO: 78053 - DNA, 429 bp, Oryza sativa
agcttgggtctcttcatcttgagtggactgagtgaggaggtccatcttgggggcctgctgcgcatctgggccgagatggcccatcttcttctggcccaactcagctgccgatgccaccttatcctctcccagtatcgctttttccccacccgtcctcttcgtctcgttctctgcctcccgtgggaacttgggagcgatctctgccaggagcggcagcatcgggtcgtggcccccctggtcgtctgagaaggggagcaggggtgaggagcataggatctggatcagagggcaatgatgtaatgttgaaggaaaatttaaatttaagcaccattgtaccctctctttcaaacactatcttgatggtataaacatgaaaactctcacttccaaacattctctcgatggtataaacatgaaagtaacagtagt

SEQ ID NO: 78054 - DNA, 467 bp, Oryza sativa
  unsure (1)..(467): unsure at all n locations
ntanatctgtttggaaatntattattntcctgcatgttcgataaatcaattggacattggacttttgatactcctaaggacgttattagagatactgatagtatgcttccaaagttattttatttgccagatgacgtgcaggctatctattttgcatttctagcaggctgtggaaacaatggaataaatgatgcaaattagaaatgggttttcattntcttggatgtctcaacaactagagttgcattntttataaggaattgtataaagaagttgtacttgctatgggcctatgggtcttacgtctaagatcagctactgtagcactactagttatactcatccgccatactaagcaccagggaattagcctaagaaattaggtcagattggtaatggtatagtatcgtttggttccatgatgttanggcatacattngtatactcactacaacanaaacctcgta

SEQ ID NO: 78055 - DNA, 404 bp, Oryza sativa
agcttattatatttaaaggattgatactcttagataagatgagggatataaccatattatgtaaaagacaataaacaatcttaaagcagaatagttatatcaggtaagatcggctgataccccggtggtacccttattggcaattaaagagcaagttagttcttacaatttcgactacaacttagtaagttaaattcaactgatgcagcataagctgtaacagaaatcgtaaggcctaacacgcctttgattgtttttcaggatggtagatacactagacaatctaaaccaagaagagcaatttagacgaagcagctagttctaggctgaactagccgatataggtaaatggcactgtctgacttagattacatagtgttatatgacaaattagcgtttgtatc

SEQ ID NO: 78056 - DNA, 486 bp, Oryza sativa
  unsure (1)..(486): unsure at all n locations
ctcagcttagtactctgtntcttgtgcacatagagagacatgtctatcattcattgttcaaagctgctcattgctaacttggcagtggtagctntgcaactcacccagaacaactatcaggatggttgatttatagagaanacacattttctgcaaggaaaattgcaacatttgtccttaagcggaaagcacactagcccacacatatttgtccttagaagaataatcattccctctagtaatattttcttccctcatggtcaccatttcaagtgcccgacgcaaaatatgagactataatgtccagtgaaaagagcatggaaattcttctagtaacatgattgtgctttgcttgctacaaccaccaagattgtcaatctgtcatgcggacatctcctaatcacagataattaacagctntattatgtttatgtgtccatcgcatatggaatgtcatgtgaagattacctaccatgggtagcacat

SEQ ID NO: 78057 - DNA, 419 bp, Oryza sativa
ctcgaccgggatcttaagcgactgagctgcagctttttgttacggaatgtgtcacaaccagcacatttctgacattatgcaagatttggtcatcagtccctgaaatgaagctggtgcattggtaagaccgaaaggcataaccctaaactcatacaatccttgatgagttcgaaatgctggtttatgttcatcttgaggcaaaagtctgatcttgtgatagcctgaccgtaaatcaagtttggtaaaccactttgctccagccaattcatcaagtaattcatccaccactggcattggaaatttgttcttaatggtaatgtcattcagccctctatagtcaacacaaaaccggcaggaaccatctttctttttgactaaaagaactggagaggcaaatggactggaactgtccttaatta

SEQ ID NO: 78058 - DNA, 399 bp, Oryza sativa
  unsure (1)..(399): unsure at all n locations
gttcattcataaatatccgtgcacaactctgatcatccgttttattttaaaaaataaaaaaaatttaaaacataagttacatgtactattcatgtgttatatctcataataataaaaatactaattaaaaaaaattaaataagacagataatcaaaattagatgcgaaatcttatggttgcggaggagcatcaagttaatagaaccattcataaaactcatggtctctgcataagccaagaggtccccgatctcattctcaatacctgctttttttttttcaatttctttgtaaatnntgttcgcaaaaccagatcaagcccaaaagtagagataatcngatcgtgctatatacaatgcgcanggatccacacacactaacgatattttagtaaaatat

SEQ ID NO: 78059 - DNA, 417 bp, Oryza sativa
  unsure (1)..(417): unsure at all n locations
agctttctctgttttcaactgangtngcagnctactatttcaagactagagntggagattacctctagttagcataggccccctgatttctccattcttttttggcttccactttatggagaatatacccccaagatcacccagcagcttctcgctctgaaaaggtgcgaagaatttcctttagccattattaccacataatacagtaaatttggagttggcaattaatttctgaagtgtgacacgaagtttgtttcagttttcgcggacttattaaggatggaattctgaaggaaacaggccaatcttggtggggacttgttacgccactatgtgatcaaacagaattaatcaggcttctgagtaatacatagtattagttattagttgcgttagttaccctggagagacctggtc

SEQ ID NO: 78060 - DNA, 424 bp, Oryza sativa
  unsure (1)..(424): unsure at all n locations
agcttatttatgtcagtccttcggaggcttagatacttgattagaagcatgttgcatagctccttggtatgatgctgtttgaaacccttgcaaccttggagatcaagcacttgaacaattccgaacttgaatgaattggatggcagctggctcaggcttccaaacatggtcagtgatcggacatgagatangttcatgctgtctgtgccactgccacgtttggaatcaccactttggatggccagcctgcgcactttgctgctgggtggcggcatgagccaataccctccaaccaccgtcacgaagttctcttcactcgccttggacacgatgtactcaagaaccatgtcatggacttggcagttcttcacctttgccgtgctgctgtgctccacgggacgtatgatcttcctcctcacgagat

SEQ ID NO: 78061 - DNA, 468 bp, Oryza sativa
  unsure (1)..(468): unsure at all n locations
tcgttcanagactacctcaaggacaagaggtgactgcatagatattctaatttcaagaacccaaataaatacttccatgaaantttcttgttttaattagttattccagtgatccaaatgattattgacaaaanatttttttaatatttactgcacttctgctcctcatttctcaatttgatcgtcatgcagcatatactgactattgtcaatttttacattagtagaatatgtgttttactaaatntgtttctcaattctcaatctggttattaggtatttaattgtgatagatgacattgngatggatcaatggagcatcatcangtcagcctttgaagacaatggaacaagcagtagaataatacttaccacaacaattcagtcagtagctaatatgtgggcggacccagaaatgggccaanggcccggccgctccatggaaattcagcccacgcanagttacat

SEQ ID NO: 78062 - DNA, 415 bp, Oryza sativa
agcttgatctgaattataagaggctctattgtactttattgtatactagaatgagggagagagtagagtagagaaagtcggaggaattccagagttgtcggtaatcgtcttcttatttcttttactctgttaattactctactttaatagaaatatcattccgagcaattaagatttattcggtgagaattatctcttggttagttcctaattagcgcgcaggatcattgatcactataatccagtaaaaatagtggttgctttagtgtttagctaacgctaaagtagttattagctgcgtagacgtggtgtctgggtagttaatttctggtggtttcttcgtatcccacagaatgtttgaggtgggtgtagaggtggtgacaaccctcaattacactgaagtccctcctgtctg

SEQ ID NO: 78063 - DNA, 307 bp, Oryza sativa
  unsure (1)..(307): unsure at all n locations
actatagagaatatattgcgaatgagtttttgctccatgaagtgtgtgttgcatgtgagggagagaagctctatttatagccttgtaatgacgggtgtatggcagttatgggccgctaactgcgcataaccgtcattggggagcgctgaggagtcgccacgtggaagatgggtgtcatgtgcaccaagattggttcggccgaacccattcaagcactctgctcaccaactttggtgagggactgacatgtgggcccctatgaaagtacnncgggtgttggtcccactttgagtccgttggagctgac

SEQ ID NO: 78064 - DNA, 419 bp, Oryza sativa
ttatcttggtctacatcaaactcatcgtcacaatcattggaaggtccgtcaggtggagagagtatgccatctaccagtgtggaaataccaacagatgggacggatgtttgggagatagatctcaagcttctcaagtttggaaccaaggttgcttctggatcaaatggcgatctgtaagttccattatctttgtcgggaagtgaaaacaatataattttacacaactggggattgagtgccatttgatgctttgctttctcaggttccgtggatcatactgcagtcaggatgtagctattaaagtagtgagacctgaacgcattagtgcagatatgtaccgtgattttgcacaggaagtctacattatgaggttaacttaatcattttttattgcttctcccatttatcgagcattttct

SEQ ID NO: 78065 - DNA, 322 bp, Oryza sativa
  unsure (1)..(322): unsure at all n locations
ctggtagcaactcacatatcacaacaagggtcatgttcacatatggttatgcagcaccggagtatgtagccactggtatgtgtccttacgcctaccctgcagttaattatcaacacttaacactgcatgtgatagtcatagtacagctgaaatagcaatatgtgtggaatttgacctctcagtcttcatatgttcccaaatttaagcgttttgattgtcaatcatgtcacttacatttttggatgcatgctatatctcctccttctgtccaatgatannaatcngaatttatgctacagaaacatataatagtccatggatg

SEQ ID NO: 78066 - DNA, 247 bp, Oryza sativa
  unsure (1)..(247): unsure at all n locations
actaagctttatcttcccgatgggcgaaattaattgcggattcttggtaattcaggactttgaaaggatggggggggaagattcaacttcaagcgatacngagattacagctgctcccttggcgtcggaccccacagggaattaaatttgagtatgctgaatgggggggggaagatattctcctcctcctaccttcgccgtgctgggacgtcctcgcttccttgacaacctatcaaggtcaccttcc

SEQ ID NO: 78067 - DNA, 342 bp, Oryza sativa
agcttgtattcgattatattctattattgcatctgctcttatcgttctggacaagagcacggtctacaaaaaagcaactttcaccattatttttcattataatatgtataaaagcgttaacaaatatatgagtttattaaagtactttttaagactatatctatacatgtaggcatcatatctgaaagaacaatatctaaaatcgattcataattaacgattctaaagtttgactaacatcttatctaacacgacaagtattattaacccgaacggagtgactagtattataatagcaagcaagccagtaccgaatgaatggatctggttggtaccggtaga

SEQ ID NO: 78068 - DNA, 309 bp, Oryza sativa
  unsure (1)..(309): unsure at all n locations
tcatgctcatgtgataattcttttgttcatttgntaagcttatggtattgtcaccatgcccttgtgtgaatctttgcacgggaagagcttacggtgtatattcttgttggtagtaacagatgatctaagtgtatagatctaatctttgtgaaattctatgtttatctattccataaagtggatggagcgagcactataactaagcgcaagctggtgggctatatatgtgtgcctttctttatacttcctccgtccgaatagcagtgacatctctattactactaacttatacagatatatgtctattcg

SEQ ID NO: 78069 - DNA, 429 bp, Oryza sativa
  unsure (1)..(429): unsure at all n locations
agctntacgttttgtcactttgcattcagtacaatgagaatttcagaaagccacaaattaatcaaaggaatgatccattccaagtgcaaaatgcatcagaaagcagcttaagaaatagtattagacaaagtgttaaggatataagaactgaatgacattgaaatctatccagtgagacattgaaatctatccagtgagagagatgatgaactgaccaatctggcacacctgcagagatgcaacactgcatctgcatatgctctcatgtacaacaacctgaatctagtcaggaatcaaacaactgaatgctagtatcagtaaggctgacaaccatgagcagagatggtcaagaactactacattgccgttttctctcatcatcataggagcttcttctacatagtaaaaggttntgcttctccctaatga

SEQ ID NO: 78070 - DNA, 268 bp, Oryza sativa
  unsure (1)..(268): unsure at all n locations
cattctgagttctctgccctgtctttctagatcttcgcgctgtctttccaattctctgctctgcctttcgagatcttcaccatgtctttggacagacaatgtgtgggtttgtctctcttcttcaagtgcttcttccttacttcaagctcagttctcgntgtctcatgctcttctttttctttgagctgcaatacatagaagaacctatcatgangtttactacgctgaatctgccattttcttttcgacacagaacatgtaatatctt

SEQ ID NO: 78071 - DNA, 429 bp, Oryza sativa
  unsure (1)..(429): unsure at all n locations
agctttttgtgactatattntgaatccaacagcggcatctattttgggacggagggagtaatcaacaataggtaaaaagaattaacacaatggttaacatgagcatgaacatcggaaaaaatctgatatctaaggtttaagcctaaggtcaatgccccagtttcctatatgaggctgcatctagaaacagaagactaagatgaacgggctatctactatctacaaatggaaactgttgggatggattggtgggattaccaaaaggaaaattttaataaggaaacaggaaataaaccttattgcaaagacaacaataaattattattagcacctagcatattgtgatgacataatcagtgaccaggaaatccctgtcttatcaacagaaaaaccatgtttcatcattgatacaatgtctgagttcacaaa

SEQ ID NO: 78072 - DNA, 508 bp, Oryza sativa
  unsure (1)..(508): unsure at all n locations
actaagcntttgttatacttatgtgaatcgcttataacagttttaaatatcttattagtagaaattntatactgtatactactcccttcatttcaaattgatctacatatatatttttaaggttattcctaaacgatatacatatttgtgttcattcattaagtctattcgttatctgtgcttggagtaaatggacattgatgcatgcatccatgcacacaagtatntataacccatatgcaatatctttatttgctattggctangaaataatggggatggtgcatacattaagtctattcgttatctgtgcattggagtaaatagacattgatgcatgtatctatgcacacaagtatttataacccacatgcaatanntattattgctattngctangaaataatgagtatggtgcatacatcgagnttgttgctagagtaaatatagtaggagagaagtanttatttttcttggtcttgatgtacttatgaaatatgtaaatcaa

SEQ ID NO: 78073 - DNA, 419 bp, Oryza sativa
  unsure (1)..(419): unsure at all n locations
agcttcagttgttttaaaatttaatacattntgattacaagtcttgacactactttgacaggtacaaaagaaatttggctgtgtgcccatatgggcagcggccagagatgtaacccatttccattatctaaaaaaaagatacaaaagaaatgagttttgggatttcacacctggaccacagttttcaagcatgtttatgcttttcatccgatccaaaaactagatgttttcgtaagtttgtattcagggacttgaaaaattcagcatgatccaaaaactgaaagttggttcaaacttggaatttctgatccaggagaggctctgttgaatacgccttgcacatattttcttaaatgcggaagattctctntnttattttcgttttgggtgaaaaagtaactatataaaaaacagatctt

SEQ ID NO: 78074 - DNA, 372 bp, Oryza sativa
  unsure (1)..(372): unsure at all n locations
tcgagtcgtcggcgtcgtcgttcccgcggtcctcgtgctcgactgatgggtggactgngaagaggaggaagcggcgatacggatggtggcgactctgggctccgacgaggtcccgaccaccggcgaggggtggctggagttgcggcagctgcggcgacgcaagaagagagcggtgcggcggccgcggagagaggatggagagggcggctgtgtgtgtggggagagaggagggagtccgtgtcccttttatacgccgaacgggagggagagagacgccggccatggtggagttcaccactgatgagcgtcatcaaaatccaccacgaataatgcgggatcgagtgggaaattatggtggaattggagaggatg

SEQ ID NO: 78075 - DNA, 373 bp, Oryza sativa
  unsure (1)..(373): unsure at all n locations
gcttttttctttcctcgatgccgcggccctcttctgccaacggagggttgactaccactancctcctcctcctggttcccctccacatccctttccacgtgcccctgctggttcccctccgcatccctctccacgtttcctttctcgttccagtactgggttggaacctcggtcccctcttcttatttcagtactggctgcttccctccgcgattgtatcgtacaatatctgttcctcatcgcggtcagccatcttgtgatacaagaaacatctgctaagtcacgagacatttatgttttaacaatctaagtcatgtatgctaagtgtaaatgtcgtacattataaccctacacaaccttacgtgctaagtct

SEQ ID NO: 78076 - DNA, 294 bp, Oryza sativa
  unsure (1)..(294): unsure at all n locations
tgctacatntacactcagtcagaatcaagcctttcatcatcagagntattattgctcggctgaaggtcgttgttgcggaatggctctacaacatcacttacaatcttgtcagccgcaccttgagcattactgataagatcaagagcagcttcttcgcttgtcccgtctgcaaagccatcaatggtatcaatttcaaatcctcggtacaaggagttggtcatcgccaatgccatactagctcccatacttncagctttcttgatattcttgagatatacatccggtgcaactctc

SEQ ID NO: 78077 - DNA, 424 bp, Oryza sativa
  unsure (1)..(424): unsure at all n locations
agcttttttatgtctactcgtgcacaaggcgcaccaccccgaactgtcccggtagctagaccaaaaatgctagcattgtgaacgatgttgccaccggctgtcgaggccatgtgcatgccatggccatgcacatccctaggagatagaatttcattcttgctcatgctatctagattatcgtcatcgatgtaccaccgtgcaccgataagttttcggttgcaacttttgccctcaaacgaggggccgacttggcaaattcctttccatttggatggaggagggccatatccatcatcagcgaagctgggtgactcgggcgtaatacctgcnagataatagaagatatgactatatacccttgagaaattggtcaatctcttgtgtgcccctcgaatttacctcatcccttacatatccctaagat

SEQ ID NO: 78078 - DNA, 425 bp, Oryza sativa
ctgcatctcttttgtttatgcccagatagatgagaggttgcttcagctggccttcattgtaaagcactgggccaaactaaggggcgttaatgaaacatatcgtggaaccctttcgagctatgcgtgagttaaacgactttgcgttcatgattttcccctttttacagctatatgttatttgttgaaaatcttgaacctgatcttgttcttattaatttgcagatatgtgcttatgtgcattagcttcttgcagcaaagagagcccaagattctaccatgtttgcaggttctataccttactttttatctcaccaatatgtttcattcatatgaactactcgctgaagtactgatactttggatgcacacagtttaagataaaatcacttcacgcttgcttcatctgcatttagactcatgatgct

SEQ ID NO: 78079 - DNA, 514 bp, Oryza sativa
  unsure (1)..(514): unsure at all n locations
tctagggtcacctgatctagtggcccttctccgctctcgcctttgtcttgagatactggattcatctccccagctgaaagataacgagattagaaaagaaaaacattgaccaaatgaagagaaaaaaaaagatagtgaccttcaacagaagtaccgtgggagaagaattgcactactccaaacagccttaatgcatcaccaagatgagaattgagtacaaaggaagagcagcacaaccacactggcaaatcaatgatcagttgaaagttgaaacatgatggctcgatccaaatcagtttgtatcagttcgaatctgggttcagcaagggaacccaaaaacagctcattatctatntacttcaaagaaaatagagcanatccataatgatggcagcgtgtataaccagacaataggaattggaaccctatcgatattcacctatagtcaanacactgatgcgaataatctagacggactatctatntcaagttactcagatctagcattcaagct

SEQ ID NO: 78080 - DNA, 407 bp, Oryza sativa
  unsure (1)..(407): unsure at all n locations
agcttgctttcatttgttgtgaaaatgctgaatatttccgataagtcagttgcatggctacctattcagtggtggaaaacataatctgagccagctactgaggccctgtttaggtggtgtttgggtcagagacttaactttagtccctatatttagacactaatttagagtattaaatatagactagttacagaactaattacataaataaaagctaattcgcgagacaatttttttaagcctaattaatccataattagagaatgtttactgtagcatcacataagctaatcatggattaattaggctcaaaagattcgtctcgcgaattagtccaagattatggatgagttntattaatagtctacgtgtaatatttataattagtgttcaaacatccgatgtga

SEQ ID NO: 78081 - DNA, 413 bp, Oryza sativa
  unsure (1)..(413): unsure at all n locations
nggaaaagaggatagattggtaganatgagaggtagcatggtcttacatttacctgcggtattgctataaatatggcgacatattatttctcaattctcagtcgaaatttttctaagcctttgattggctggagcgccgcttntttcggtggcattggtctcatcaattgcatttgattggctcgaagcactgctttaaccgtagctcgttggcacgttctttcacataagtaatcaatatatgtaattttcaatgcacaatatagaaattacattgcacttacattataattacattatacttacatatgntaattagagacttacatatgntaatttaggacttacattgtaaatacactaaaattacatatgtaatttagaaatttacgatgtaaatatataccgactat

SEQ ID NO: 78082 - DNA, 419 bp, Oryza sativa
  unsure (1)..(419): unsure at all n locations
agcttgctttctattgtgcagagtagagagcccaatggagagaatccatggaatcccgggaaatgctttcctcctagcctttcataccacgtggagtcacgtactaagcaagccaaaggcaagaagagtaagaatcacaagagaaaagcaccgatgcgaactgaagataaagtacgtaagatgactattaccagcaccgaatggcctccagcagggataactattcctagacgtcaaagaggaaataccttccgaggtgcacgacagttgacccagcacctcctaagccatggcggcagagtatctgatagtgaagggtcagatcaagtctcctcggattatgaagatgaatctncccgacatcttggcgaggaagagatgtgaataaaagcatgcccccgttgtggagaaattggaca

SEQ ID NO: 78083 - DNA, 321 bp, Oryza sativa
  unsure (1)..(321): unsure at all n locations
tgtgccatttgaggtcactgactgtgtgtgggcaaagtctgattattctactgtcaactctaccaagcatgtgcccattcttacgtgtactggatctcagcggntgtgacaaagttgagaatcaacattgtaaggatatctgcaagttgtttcaccttatgtatttgcggctatatggtacaagtataagcgagcttccacaagagattgcatatctgcaggttttacaggtcctggacatatctatcactaatatcaaagagctgccaccgacacttattcaactaaaacagcttgtgtacctgcatttcccaatatgat

SEQ ID NO: 78084 - DNA, 416 bp, Oryza sativa
  unsure (1)..(416): unsure at all n locations
agtctttgtatcatgctgacaccatatgttcaagtgatcgttactagtactgtatgtatgtaatagcatgttgtcatctgagtggccatggattcgttactagtactgtatgtatgtaatagcatgttgtcatcggagtgagattttgtctggttggttttgcactcgcagccatgaccctcgtcttctccttcacaaacggngtggattgggatggaccgtacaccctcaagttcagggtccccaagccatggctcaacaagcccttgagcttcttcaacgaggtaaaattttgctccgagttcgtgttgttttcaatcaaacaagcttgatttgtaccttgaatccaattttattgttaattaccatttcttgatagcttatgcactggaaaagttgaaacttctctttggatc

SEQ ID NO: 78085 - DNA, 249 bp, Oryza sativa
gcgacaattgcgctagatgtgtagcatcaagtgcctaccaacatatgaaattatagttgagcaatgagtatgagtaagaggcattgaaactgtaccagccatcttgtcaatcagtccaagatacttgcagagggagatgcaacactgcttcttgtcgtccgggagagtgccaaagaaatggatgatttctttcgcgtcgaacttcaggacaatgttgtatgagacaagaaagttgagaaggtcccatac

SEQ ID NO: 78086 - DNA, 365 bp, Oryza sativa
ctgttgtttttgttagcgcccaccaccgccgcacggtccaagaacctgcaatacatggcgagttcagtgcgtgcatgcgtgatcagttcacagctcacaaaaccacacaacactttacctgaaaccttccgtgtgcaggagcttcctcccaccggaatccgccttctcgtcgctctcgtagagtgtcacggtgcccggcgactcgccggccttccagttcctgcacgcggcgaacgcgacctggaagatcctgccaaccgggttgccgctggggcggatgtaccggtagcggagcgtgccgccgaggaacagcaacagcgcggtggccgcggcggcggtggagacccataagccgagcgcccagt

SEQ ID NO: 78087 - DNA, 424 bp, Oryza sativa
  unsure (1)..(424): unsure at all n locations
ctgtagactggctgggtagctggttgtgtacgagaattccgcatatggcaagctnttgtcccaagctccaccaaaatcaagagcgcaagctctcaacatatcttccaagagttgattgactcactcggtctgaccatcagtttgcgggtgataggccgtgctgaaatttaaacgggtccccaattcttcctgcagcttctgccagaattttgaggtgaactgactctctcgatcagatacaatcttcttgggtaccccatgcaaacacatgatccttgccaggtacaactctgccaatttctttcccgtataggtggtatgcactggtatgaagtgagcaaccttggtgagtcgatccacgactacccagattgaatcgtgacctgatgatgtccggggcagtcctgttatacaatccattcca

SEQ ID NO: 78088 - DNA, 428 bp, Oryza sativa
agctcattattcttcattagaatgaagtctaccctgagttccctgtttcacagaagaaataacgatgggctgagaatcttgagacctgttgcatgtgacaacaaaaaatatcggaagtagacaagccagtcttatagaagaggatttaagtgaattgggaactacaaacacgcagtatagaagtaaagatggagtggctattggtaaaaaaaatcaacagtgggacattaaagcatatcagccaggaaataacaaaacactccaacagtagaagctaatctgaccaactgagtggacacgccatacaaatgaagaacacgctccaacagggtagtgacacacattcagtaagtaaacactaatatctttgaagtactgatcaattcatcttcatttgacagcttcgaaccatggtactccatacttaa

SEQ ID NO: 78089 - DNA, 426 bp, Oryza sativa
  unsure (1)..(426): unsure at all n locations
agctntgatttttatgtttttttgagcacgatcaggatgctattcacttcttgttcactcacgtctccgccgagtgatatgattttggcggngtcagagtcatctatctgcaaccagacaaccttgccgtggggacgggtttcagcgtcggcctggttctttcttgccgttcgacttctaaggtatgaactcccctgtcgaaggaggccacctatagatggccataaggcccgaggcccgaaggcccggcccatggcacggctttttggcccggcccaagcaccgcacggcttgacttgggtcgggcccgtgccagcctggcccgaccgccgggccgtgtctgggcctcccctccggcacgctgggctggcccggcacggtcaggccggcctggcatgatgggccggcaggccatgcatgccacac

SEQ ID NO: 78090 - DNA, 430 bp, Oryza sativa
  unsure (1)..(430): unsure at all n locations
actaagctgcctntctaggttagtgtacggggatttacatggttgttttatgaatggaattacatgggatgcagtgtcatttgccatatagcctttatgggctgatngcttggcctggtctatggcaacgggcttatatggccagggcggcctgttgggcctccttgatgccgaactcgtcatggcgaagtctttgtagttcgccgaagatgccttcacccgagatgcctntactttcagaataccgacgcggctttccagccttcgccatcttcgcttatggctntcgccataaggcttcgcctgaatggccttgacatctattgcttgaatccttgctgtactatagtttcngcaggtccggtcgaagggctcatggatgcctcaacactaaaaacctagaatacaaataattggataaggtagatgt

SEQ ID NO: 78091 - DNA, 425 bp, Oryza sativa
agcttccctaactagactctagagcttccattgagcatttagaatgtactgtaattgtagcttggatggacccacatatatggaacggaggacaacacttgcaggcagtggcggagctagggcccgaccatatatgaactgtagttgaatgtgctgtaaaattaaacaaagcaaactaatcgaatggattttaatgctcgattgatattttacacttaattaattacctctctgagatttccgttttaaacagaaaaatgttgagttaaggtcgtcctaatctggtaactaaaattcctagacatgcattatcaaacatacggaatatgtagataatgagtatagttagagcatttacaatgaagctcccattgagcatttacaacgtgggaaaatatgtagtgcaaactatatatgtagtggaa

SEQ ID NO: 78092 - DNA, 439 bp, Oryza sativa
  unsure (1)..(439): unsure at all n locations
tggtgagcggtacctntcgtcggtgctcttccagtccatcattatggaagctgaaaacatggtggttgaatgaaatgcacaatatccgggaatccacaggaataaaagtttggtatctctgcttgtgtgattaaacatacattgtcctgccattntcaagttgttctgcttgtgtagcaatggggaacacagtgtgttagccttgtagtgttaaaccagttacattntatcttccctgtatatcagaaccctttacatgggcatttgtcagccagtgtgaatgaaataaagcatcatatgatttgtctcatggtttgggatctcgtctgaaccataatattcttataagagaacaaggccctgtttangtcacaccaaactttctccaacttttcatcacatcacatccaaaactttcttgctcacatnaaactctaac

SEQ ID NO: 78093 - DNA, 423 bp, Oryza sativa
agcttactaaagacctaggagtatgacttatacactccacccgaggggtagtctacagacggtctagtaccagataagactctgagtgaaacttgcttgcacaagacttgcaattcaaggcgtagtccattgttcaagttgtgagtaagtgtagcttgaagttctagatggatgttcaaccttaatcggtctccatcgaaccgctggtatataaacagtacattggaaaaggcaaatctcagtgggattttgagatttggtgggggattgttggaattaatagatgggctaaggcccattcaagtattaattctttggaaaatcacaaaagcccacctcatgggatggcatgcatgtggagtttagtaccaccttgcttattctaggagaaggggacctccttaaaagggaggatgccctcct

SEQ ID NO: 78094 - DNA, 534 bp, Oryza sativa
  unsure (1)..(534): unsure at all n locations
gacaaggctaatgtgttnggcacgtcatgggttgctgttttagcgtacatntactgcagtaaagtataaatgaatctattcgaatagccgtgctcacggatttgagcattgtgactcatatagtatttggttagaaacttaattccaaactttattaaatactgttgtattaaaatcattacaggctttctacttatatattctctgctttctgcaactaatcatagccctactcaaatattaccatttcatacattcattattgaatataatagcttgctgagtacgttgtactcacccttgcttcaacccccttttcacagtcaatntggagttcttactgaagctgggagttcaatcacataaattagttcccttttaacctagtcttcanatcagattatttagatggtttaagtctataacanaacagcanagttaggccattctaaaacttctggtgtaatagntagccataatctttgtaataccctattactntatataataatatctctttcaaagatatgtcta

SEQ ID NO: 78095 - DNA, 425 bp, Oryza sativa
agcttatcttccaacacgctaataattaaatggaaaaaatcttcctgttataaccaccgctccattactccttaacatgacaatctaatacaaaatatgatatattttaatacttaattcagattcgtactagtataatactccctccgtcccattttaaatacagttatgttttttcgtgctcaactttgattgtccatcttatttaaaattttatttaaaaaaattaaaaacataggtcacgcataaagtactattcatattttatcatctcgtaacaacaaaaatactaattataaaaagtttttaaataatacggacgatccaagttaagcacgtaaactcatggttccacttaaaatgaaacggagggagtatatccaacccctactatattatagtattttaaataaaaggagtattaa

SEQ ID NO: 78096 - DNA, 355 bp, Oryza sativa
  unsure (1)..(355): unsure at all n locations
tattccgctgtgtgtatcactctctccttggcagaacaccatatcctcacccaccatatcacaccactatcccagtctcgactaaggccccgatcaccctaaccccttctctatctttgtatggggagtgctagcctgctaggaaattcctggcctccatgtctgtgttgcttcaactgcagcatccacgctttgttgttgcattgtctaacactactacgagatgggttttcccgtgcagatgaatggattttcgtgtgcggatgaatggcccgcacgcaacacttcatatgtganaatcgtgattnttgcgtgctggtggtgcccccacacgtgaaaataggatttttccatg

SEQ ID NO: 78097 - DNA, 425 bp, Oryza sativa
  unsure (1)..(425): unsure at all n locations
agcttgtattaagaatattattcgagacaaactgcacaactatttcttaaaagctagaagtaaaaccaattttgattttaagaatgattttggatagttttcttacttgtgagttggccaactaatcaaagaggcgcaaggaaccctaaggtacaaatcaatttctaaaattcaaaatcagctttagtttttataaggaaaagtaaaaccaaacgcggtgaaatcatgagaacacaatggcagcacacatcgaatgacactcctggcttcagctttctcccctgtgccctgaacttgtccagttttgccctgtatacattgttaccgataattggccttgttccctgcagtgcagctgctgcagaagaacacgccaagcactagagctagttgatggctntatccattactaattcgctgcatat

SEQ ID NO: 78098 - DNA, 436 bp, Oryza sativa
  unsure (1)..(436): unsure at all n locations
tcaggataacatggaataagacctataccatcttggctgtatgtgttggtgaattgccctctacgtggagggtacatgtggagcacagttggaggcggtggaaagcctgtactgcccatagtgggtaccattggaaaatgcggcttctgctgtgttgcttgcacctgatgccacatatggtacattgcttgctctggtggaacacttgggtatgcatgcttttgtaaatgcaaccggccataaaatgatgcatntgatttcggataagagggtctccgagatgacgggcggttactggcttgctgttattccttttgctgtggtgtctttccttcatttgtctgattcaagcttgcaagagtacgagccactataatctgttcctgatcatcatcgtcatgatctggtggacaagatgaagatgatggctcaccta

SEQ ID NO: 78099 - DNA, 424 bp, Oryza sativa
agtctgttttaacctaaactcacttctgatttgcttaatactgctttcaatttcaatgaaaactgatacctcctttcccaagtgtgcaacgaacgcctgtgttagatgtgaactcaagatggatccaatcttgcataggattccaaacaccacagcctctgccatccagtcctcaaatcttgcagtcaaatatagctggctcaattacagttattatcagtggacctgaaaagtgggattggacgtgaaacatcgatcatcatatgtacaaactttgcactggtattgctgaaaagttgtgttaaatcgaaaacaaatgattgtgtgagctttcaaacaaaatatccatctagcactgaaataaaaatgtaatatagacacaatctaatttgtgatatagccgaacacccttcttatggaagta

SEQ ID NO: 78100 - DNA, 425 bp, Oryza sativa
tgtcaggctcctcctgtggcccatagacgatggagagttctctatgggcgacattagaagagtgtcgaaccaacgcggttagagagaaatccgcatggtgaacatctgagacagaccagacgggcgtgcgccaggcaagcaacacccccccactccgaccgaccgcaggcaagatagaataatcaaagtcgaggcctagcatttccagaatagtacgagaggggattacatccataatagtctcctgaagatagagaagagagacatgctcatcacggactacatcacgcacagcatcctggcgggcgcgcgagttcagacctcgcacgttccacaccaaaacgttctcgttgcacgatcccattgagggggaccacaccgagagcagaagaaaagagaccaatcagccacacacgaccaacgcc

SEQ ID NO: 78101 - DNA, 422 bp, Oryza sativa
agctttgttctcctatcatgtaggtcatgcagacatcatgcagaaatgcacttaacaggaaaattgcaagaatcttctgcaatttcatattctctgacaacagccaattttgtgactcgcgaggcacgcattttatagtgcagttgttagcacttttttgctatgatccaaggctcctagccactaatttttcagagattagttgcgctgtcctgctctctgcattattaagcggcaacattcctctgtgcattgctgtcgtttaatgacgctgcgaggctgcaatggtgttgttaattaccttatcgctttgcgcagaaatgattgagaaatcacgcctgcaattcggaatcttttccacatgagtgccactcttgtgtttgtctgtctgcctgcctgccctcagtgtgcaagctgcacgt

SEQ ID NO: 78102 - DNA, 391 bp, Oryza sativa
  unsure (1)..(391): unsure at all n locations
agcttgaataacaattaaaatttttgtttgagtgcacaatatgtgcattttgttaaattaatgagattaaataattagtgcggaaaattttgacataaatattgaaaataaaaaatgtaataaattaaatttttatttgaatctttaatagggcaatggatttttttttatcatgagcattcataaaaaaataccgtggacgttggtagtcctatgtttgtacgaatactcctcaatttttatgacttttttaaaaaataaatgcatatgtttcatttcattatctaaaaataaattgtcataaataatgtatcgcacagcaaactcataactataatagtctcatgcgacaaacatttacattntcaattatgtaactcataaatttcta

SEQ ID NO: 78103 - DNA, 321 bp, Oryza sativa
  unsure (1)..(321): unsure at all n locations
ngcccgtgctcaacttgacaataccctccatggctgccactgtcgtaaatgcccagcaacaacctacaataattattcatgtttacactntcgattacaatacattntacagatgatttgtaaaatgttgcagtggcaaagtggcttgaattttcttaccacactggccttggtccttgatgggtgtgacagcgcccttggttctccagtccacggttgctggaagcgtgtcaatgctaacattctcatacctgaatgtggtaggaaccctaaccgtgctangaatgaatccctttgtggtcttcgtcgccccgaactcat

SEQ ID NO: 78104 - DNA, 413 bp, Oryza sativa
tagcttcatctatggcccgaaagaatctgcaataaacagtacaaccctctgccttttacttgaaaaggaatataacatgcaccaaacagcatgcatcacagtagcagtttttgtagtacgtttggaagattgaatctctttcagttctacactgctgtggagagttgcccatgtggatagtgctgcgcatttagcttctgttgatgtcataacaagccaataattaatgctacatcataaggccatgaccagatgtacaagttatcacgttacacgtggatcattacgagtagttcataacaagcacttgcaacgaatgacgcaggacaataaaaacagcattataaagcttccatattcgctaatcactaagatgccattatgctgacaatatccaagcaggaatgttatat

SEQ ID NO: 78105 - DNA, 478 bp, Oryza sativa
  unsure (1)..(478): unsure at all n locations
gcttcagcgttccattgcacagtggcactgacgggcatnccttgntctgtactgcagtgcagnttaacctgtgtgacacagtgaaaagaaatgtaaattctttggttactgcttgatcagaaacaacttataaggagatggaaataataggggagcatactggtaggtagttgaactgcagctgcagcggatgcagtttcctgcggtgaatccataggtgccatccgggaggagcatcagattgtgatcagctgangtatcgctgattgatgaacggcacactgaggacaccagttntccagaagttagtactaggtctaggaactcgtttcatatgacattcttaccgaagaaagtgaatagtagtaaacatcaagatccatctaagatagtactataatagtatantttgaaaccttgtgagtagcgagggtcaactctgtggattggattggtagttattccgtaatttaaacca

SEQ ID NO: 78106 - DNA, 416 bp, Oryza sativa
agcttgccttattgccacccgcaagcatgacactcagaatttctactaaagcaagagaagtaagatgtcaagtcctcaatggagatgaactgaatgctccagcactaatgctctcggtgactaattccttctcttggatatcatcttcttttcccgggacctctcattcctatggcattttttctttgagcgaacaataacctctatgtgctatttgtattactgcttcacatgaagccctcaaggtgatgcaatcttggaagtatatatatagttcatttgaattatcgacaccattaagagtggtggaaatatgggatgtttggtggagctatttattaagggttaattattagttgtagtgaaacaatataccaagcgagctgaggtatccggcaagattatgacacttacta

SEQ ID NO: 78107 - DNA, 395 bp, Oryza sativa
  unsure (1)..(395): unsure at all n locations
tggttgcatgttgtcatgtacagtttttctcttttttagccctttggctatnntgtacttttgtccttctatcaatataacgccagtcaattctgaccagccgttcgaaaaaaaaagactaaagcttgttataaaaattcaattagtttgttttggattagatgcatggaatttgtcgagatcttatggaagtatggatctgtcggtaactccaaattaagtgactaaaaaactggtaaaaatagttacattattgtcatattttgagcaagttagccatacatcttgcctgcatatcaacgtcatatgtccaagtaacatcatggtttcctccctgngctacggntcgagatcaaataccaatcagagagctgctagctatggtacactaaaat

SEQ ID NO: 78108 - DNA, 421 bp, Oryza sativa
  unsure (1)..(421): unsure at all n locations
agcgtaatgttntcacttaattactatttcagtgatacacacttaatgttgtactgggccattctaggtatcgattcataattcatcacttgtatggcagactgggagacatgtattctcgatcaactattatgattcttcagacaaagcatgccaattcaactggccttttagtgctggaaaattcgactgcttggttcatgaaaatgctcacatatttgcgcttttgcatgctcaatccgggttgatgcgttgtatgaaggggagctatggtaaattgtctaattttgaagtcactcaattatatagatccttnttgtgtgaatcatacaccaatctcattatatgtttaattggacatatatgcgggtgcaactgagttatatgcattaccaaatattggtgtagccgtagcacatgc

SEQ ID NO: 78109 - DNA, 195 bp, Oryza sativa
tctcttggccttaactagctatcgtgactgtgagcgtttgaggcgtggcaaaaatctgtcgaagctttcgacatgtcgacggcgcgggacccaatcttctgttgcagagaagttctgcgcgacaaccattagagccgtgggccttgataacgtgccgactcagtgatttgttagggtatttttggtttggcgcct

SEQ ID NO: 78110 - DNA, 418 bp, Oryza sativa
  unsure (1)..(418): unsure at all n locations
agccntaattatattatggngannacgactagctagtggccgccctaaaatcgctacacctccaacattgttaagtctttcttagaaattaaattaaaagcctacaaggtaaactctaataatctaggaaaattttcaacataaaaatgagctagataaaattctattaaatactctacttgttgctctattttctagaattttctgggaattatttgagcaagggaagtatttttaataattggaacaacatttcacaaattattttagttaaaaagtttaaaaatcccttccctaagttgttgggccgaattctgcccaactactctgtcttccgcgcgcccgagccggcccaaagccaccgagccgggctagaccaacccggcagtcggccgctacacttgggagaccgacatgt

SEQ ID NO: 78111 - DNA, 428 bp, Oryza sativa
  unsure (1)..(428): unsure at all n locations
tcgcaacctgaagttattgtacagtcaataacagagactcacctattatgttttggtgntttcttgctgaatgtcaaatattattgtgtgcttgtaggagagcatcagacaatggattcatagggaagatacctcattattttggcagcatgactaatttagaagatatgtaagaataattatgtatattaacttggtaacatatcattcgctctatcctaatcagagacagatgagagtntgcaacataaattttctgcatatatgattttcccattcgaatttgaacaatataatagcaaacattttcactcaacaaaagtgcacacatctctatcacactaaatntattccaggggcatgttactacatcgagatnttatgaaataaaaaagggaaaaaaaactgttgatacacatacagcttac

SEQ ID NO: 78112 - DNA, 407 bp, Oryza sativa
  unsure (1)..(407): unsure at all n locations
agcttggtcacttcagctctgataaatttaaaatcctgttcttggtagcttgagcttcatgttggacagctatagtgtacttgctattgttagacagctcatctgaaacacatatatatcacaaatcatcccttgattttcatgtttttacgtatggtgtgatctcaatcatatctatttcaattacattgttattttgatcacgtatatgtaggctccgttttgaatatctgaatttgctggcatgaattgcacgcgaccttgattcaaatctgaagtagaaacaaacttccttgaccaatgttacattgatgaaccagacaagcaacacccttatcgtgggaaacacaattgtcagttatctctgaaatgatgcgaanacataagacatatgcataatcctgacg

SEQ ID NO: 78113 - DNA, 311 bp, Oryza sativa
  unsure (1)..(311): unsure at all n locations
ttttctcttaaactatatcctgttgcctgtcatattcatatgtttacatgggattgaagtagccagtgttgatgcaagctagactcaaggatgctggacatgtnttttntaacaataagttaagatatatttaacttacaaataggagtacataggctgctaggactgcctacaaatctgntttcagaagaacaaagctcgatttcttttgatgtaagtagatagcatttcttgtgtggcctgcattttgtatggcctgcattttgtagaaagctatatgagtaaggctggaaacgagttgagccgagcct

SEQ ID NO: 78114 - DNA, 426 bp, Oryza sativa
  unsure (1)..(426): unsure at all n locations
agctntagttttttaagcctacaggatccagatatcggaaaaaaacaacagtcagtgacagactaagaaaatagtgtactggtaagttgaacaatgtacccatgaggaagctcccaagtagtcatgcctcgagaggaaaatgaagctatatggttattgtaatcaataccaccaacaccaatgacgtcactctgatcagccgggttatttagcgtgccataaagagggccatcatttccaatagctgataccataataatgttatttgctgtgagctcccaaacctataaaatattcagaaaattacaaagtctcacaagatgttcataaatacatcctagaaatccaatttttaataatcaggcagcaggagaagacgtacattgcttctcaaactgatttctttttgactcggtaatagaaaat

SEQ ID NO: 78115 - DNA, 502 bp, Oryza sativa
  unsure (1)..(502): unsure at all n locations
tgtccggtctacaacatgtgcagntcagttntgtatctatcaaaccaccttccaagttcagaggtttccctaacctgagaaagcttgatctgcaacttctagatgcctcttcaaaggattttgaaactatgctgtcaaattgcaaacttcttgaatggctaagcatggacagatgccgcctgaatggtgaacttatggtaggtagtccattgccccgtctggtatacctacaagttgtgtactgccaagtaaccaagatacaattccatgctgtggagctagctaattntgtatataaaggagactntgtgcccatagccctcaagcattcgttgaagctggaaaatgcaaacatcangttatatagtttgaatgatcggcatgctatcagtgacctggtaaaatgtttccgaacttcaaaatctgaatttacctttcttggacgatgcaaaggttgtctcagaactaaccctcatgctacagtttagctgttaacatatct

SEQ ID NO: 78116 - DNA, 415 bp, Oryza sativa
agcttctgttccttatctaaaaagcagtccgaatacgattaaagctggctgcacaaaagtaaaatgtctacataaacttagtagaagtgaaataatgtacagaaaacccctactatgtgcaagttcaaccgcatgctgattatggtttatatgcacataggaagcatctcagcacatgctatgatatgcatgcccatacatctttgtagaaattcttttgaaatataatttagaggaagaaaacagacaggtgcctttagtttcagacctttgttcacacttctgccaagattgttgtgttcctttagtggatcaattatgttcagatattttgaacggaactcagtattgcatgcattagaatctgtttttgcaccgagttattgaggaactctttgtcaaacagcaaatcact

SEQ ID NO: 78117 - DNA, 410 bp, Oryza sativa
  unsure (1)..(410): unsure at all n locations
ctaagcttaagacttcatagtcgtcaagtccaacaacaccattctcattttttgtatatcaagctcttcatcactcagagcttcttggttgcgtttcttttctttagtacactccagaaagttcaatgcgctatcagattcatgcagtgtaagcttactaagtggcaaagatnggctaacaagtgaacttggaccaacaagagaatgagatctcttgaccataaccaaagggtcattgtaaatcccctcactggactcagtcaaaggtgcaggactgtctggagtgaggatgctcaaatctgtgggagtctggactgccgtatgaccaaaaacatcagaaatatcgaactcaacgttctcagaaggcacaacatctggatggcccattggcagaagtatcttccctctaa

SEQ ID NO: 78118 - DNA, 426 bp, Oryza sativa
  unsure (1)..(426): unsure at all n locations
agcttaactatctntttttctctcttttcttgtacggtgtgatatagcagcaatgcatatcattatcacctaagttagctagcatatcctgtggccttttcattccaaattaaaccaggcaactattttagccagctagcaagacatatttgtctggtcacttcaaatggcaccgtgtatacatacatacacgtagctgccctagctagcttcaccaagaaaacgataaaaatgtaatagaaatgcttaaggaattggaataagcaaaagttaaaatgaatatgggatggggaaaaagttagtacttgatcttctcgtcgtaacggctaacgagaagaaaaatcttcttatgggaagtgttcccatccatcgagctcttatatggtcaattaacgagattgatattgggttttctataatgtacta

SEQ ID NO: 78119 - DNA, 382 bp, Oryza sativa
  unsure (1)..(382): unsure at all n locations
ctttgagttctcttctttcggtagcctatcactttagcaattgcatgatgtacttcttgtgcataatatcatctaaactttattaattagctaacttggcgaataatggtcttacaggagaacaacgagtgggttgaatggcagacaactgccctggtcaaacgcaatgatgttgagaacgtttatcattgggcctgtgggtanggttatcaccatgtttgtgatgnctttgtgatagcgtacacttgtcttcgctgactattggctatcaatgctttgtgctgcagtcgtccgacttctctacatgatcgtggtatggatagcgatgatgatgacttccgagacanggactatgatgtggcggcacttgctaataacctga

SEQ ID NO: 78120 - DNA, 420 bp, Oryza sativa
agcttggtctctgaagttatttcatcatggaaaactaaaaacaataatacttgtcagctacaggttatcaactagttggtgcaatatggtataaacagtgggaagtacaattctgaaatatgtgcaatcactagcatcatatacacattagcagcaaatcttctgtaaaaaaggatgatcatttacatctgtataaactgaatattaacatagtgaatcccaggatgcttgctggttgctcttgtcaacatggcctccgctgcctttttgtacactggagcttcttcttcaacctggccatggccatcctcatcatgtctttcactaaaatgcttaacctttcttcgcggcaaggccggagtttgccacatccaatggtgagctagatgaatatgtgcagagatttgcataaggttagtc

SEQ ID NO: 78121 - DNA, 388 bp, Oryza sativa
  unsure (1)..(388): unsure at all n locations
tcgtccaanaagaggttatatgagattacgagcttaatttatctttagacttgagatggatcgagcaatggatcgagccgaggtgttcttttataaggtttcgagaggttggcaggtcaaacttaacgtgcatggcgactctggcgggggactgcgccgcttggctgcggatgggtcccgctaagcgcgtgtggacgaaatgagtngacgaatcgctgtaacggtgcgagggaaaaccgggtgaggcaagcactctagtttgggatgcgttttgtttggggaaggcgacatttgtttgggttgggtaggtaggattcaaattgagcttttgtttctttatcatactcctatttgngagaatatgctaggtacttttgatgatcacatg

SEQ ID NO: 78122 - DNA, 392 bp, Oryza sativa
  unsure (1)..(392): unsure at all n locations
agcgcaccctataacatgacccacagtatggaccgcgtagtccatagtggtgtactctttctcctagccttnttcccactgggttttggtaggaagtttgacgaggcatgagttggtcgcggataggcccaacggggagtgttgtgaaacaactctangagatatgattcttgtgggctaatctgaaccggagtagagataagatctatctcttcctacgacccctatatatatatgggcagggtctgacatctacaggtggcttgtactcagatgaaaactataatanagagagagctccaccctatatatgtgtctattgtctacttctgcaatattcttgagggcaaagggatgggcgccggtgttctacatcatctcacgcctctact

SEQ ID NO: 78123 - DNA, 424 bp, Oryza sativa
  unsure (1)..(424): unsure at all n locations
agctttgtctatcttttggaatgccttccgcttgagcctatcctttgcttcagccggaaatgtgaaccatttctccattgctgtccaagctcgctctttctcggcttctgtgaccttcccgatatctttatggaggatcccgaagttctcacgtgccgctagcccgcagcagttagaccatcttccaatgacagtcctaggcgccgtgggcctaccactagcgtcaatctctcttataacttgcactgtggtcggccatatattttgtgaccggggatttctgctagacctacttgcacttgtcgcgcccgacatcaacgtatgttgttcctgcggcaattctgcagcacaaacagaaggcaatatttgctaaggggtgctagctaaaanttatgtggtcatgtggtgaaaatttatcctataa

SEQ ID NO: 78124 - DNA, 469 bp, Oryza sativa
  unsure (1)..(469): unsure at all n locations
tccattanatggggcagacggctcggatccttccatgttcgactcatccgccaccacccctccgcctataggcaatacgtacctcctcctacttctccccttccttcttcccttcttctcttcctattacagtacaccactaattttttttaaaaaaacaaaagttagaaaacattatgtatagaaatactatatataaaaaatntgaatcgggtatgtaaagctttgacttataaactttggatctataaattgtaggtgtataaactctagatgtatagaaatactatatatagaaaatatttgaattcaaattcaaaattgaatcagatataattcaaattcaaatttgaaacggggtatataaactttggactataaactttacgtggtataaacttaggtggataaactntagatgtatagaaatactatatatataaaaaaaggttataaactttagggctat

SEQ ID NO: 78125 - DNA, 407 bp, Oryza sativa
  unsure (1)..(407): unsure at all n locations
taatcttgagtggtagcaattagtctgtctattgcatatcaaaactcacctttgttcattcaaactggatcaagtaactggctgatgttttttatgtatgaaacaagatgtgtgatgttgttaggttgtgtacttgacaggtaccagattgtagaaggagagcacgctttgtgggatggtgtctcacagccatacagagaaacaatacgtgcctttttagtctacttccataatgaggtcagttcctctgtagtattttcttttcatagcatatttttaatttgcttaaagattttgctttgaaaatttcaaatgaacagttttctgactggagaacagaagagaatatgaatnttcgcctcccccccttcttgtttctcttttgccaagatttattntcctggtat

SEQ ID NO: 78126 - DNA, 508 bp, Oryza sativa
  unsure (1)..(508): unsure at all n locations
tgggtganacgtgaacgaaantggtggtgcgggcttgctagctgttctgacgatggaagaaaaaaaaatcgaaatccgattgcgctgtggatcaaccgatcagatgagttacggagtaacgcgatacanactcgagacccaagccaacagcgggcggcgtacaaaattatttgacaaaaacatcttatactcttataatagataaaaataaagataaagataaagatttttactatagataaagatttttactgacgaacagattttttatcgcttttgagttggaccttcttttttattaattttttacctctttgggtcggactnntttntntaacagacaacagaaaattaagtagtaaagataacataaaatttaaaaaatcgactcatgacgtaccaaagtacgatataggttgagaagatttttatcctacttgggccttggcatgtaatcctattcttgactctgatgtaatcctgaccatgtattgtaatgatctgacta

SEQ ID NO: 78127 - DNA, 281 bp, Oryza sativa
atgatgattatattatatgaatgaatcatcacaagaaaagagatagagagaatcacagagtatacaaaggagaaatggaggagtcaaagtcatggatcatcacaccaaccttagatagaagtatgccctgacctcagcgaatgaaccagcaaaggaggaataccacttctagcgtatgtcactatctacctcggaaagaacaaacaacagccgcaagtagaaaggagaaaaacgttgagagcaatgcaagcctacctcaagctcaggaggacaccccaccc

SEQ ID NO: 78128 - DNA, 437 bp, Oryza sativa
tattgagcgctcttgcatagtgacgcacagtttactttttggggcataccggagtaaatttacctcgtatgaagttaacttctgaccttggggcagttatgttacttactgatgtaactttgttaccatatgggttgactatgccatgagggtatgcgtaccataggttcaagaatatgtctaatgttggcatatccttaagttactactgatatgtattctactactgcacgacattcttttcttcatagggaacatcttttctggtaaggcagtagataggcatcttcatatgtcgaattcatattaacagtgtatccgtattttccttatagccttgtactctgtagactttgctttgtatatacgagtctatgacctaactagcactcatagggacctagttatagtatgttattgtataatgattgatgtgc

SEQ ID NO: 78129 - DNA, 283 bp, Oryza sativa
  unsure (1)..(283): unsure at all n locations
agctntntgtgtttgcatgtgttcgcaagagagaaaaatgtatagagagtactccagtgtatatgcaagaatctcgttgagcaagaggaaggatcttccccttgtcttttttttaaatataattctgccaggcactcacatgttgataagacagcaacatgcaggtatttacgagtagtttgtttctttacttcctacccactcccaaatactccaagttcagtttgaatttcggaaaagaatttgacacgctagtaaaagatggtaagatttggcccttaaa

SEQ ID NO: 78130 - DNA, 412 bp, Oryza sativa
  unsure (1)..(412): unsure at all n locations
cttggatgaatgaagaacttgatggagtaccttttcaccatgccattgcttntctctttccctcaccatcacagacgcagtcttgctagccacttgcatcccttctttagcctttggactgccagatccggtggcaatgagctcgtccaatccagtttttgtgaccgtgagcgtttcaagaccaacatcgatgatgtttgtgggcaccacacatcttcttcttggactctccgggtgaaaaacttatttcggatgcctggaacaatgatgatgatattcaagatatcgcagaaggcgtcgcattaaagtttttctggtggtgcaatatcctagagacgggaactctattagaatgggttcgttggcgatttaagatctggactaatgactgattacaactcagttatctaca

SEQ ID NO: 78131 - DNA, 409 bp, Oryza sativa
  unsure (1)..(409): unsure at all n locations
agcttagataaactatctctccaactctctgactggctgtactgatagtgagcgggaaaatgaaggcctcccgctccgagaagatgacctgcttagctcacggctagtctgtgttgccacatcttttctcgaaatttcacgattactgatggtggtcaaatctgatgtgaattcgatctgctcatctgtgcaagctgcaaaatgaataaagactctgaataataattactagcttctagcttccaaattttgagcgttatttgcaaatggtgaaagatctatctatgactggattctaattaataattataatcatgatgtgtaccaacatgcttattgacaaaatacttcgcataattcttnttgtccgagaatactttgtatagataactggcactcttttatattc

SEQ ID NO: 78132 - DNA, 428 bp, Oryza sativa
agcttatgtcttttgttaaagaaactatatggtattctgaaacaacatttcgactcctcagacaactagaaaaattagatcatttcaatttcagcagtctcaaatagagcctaatagattacataggatattcaagagtatatttgacatgcaaaaattatactagtatataatagattgcataggatatcgggctaattattcccttggtctaacaaaatcaacttagaaattgatgagacacttccctcaatctcagaaaaaaaaaccttagagatatactccctcggtttcatatcataaaactttctagcattactcacattcatatagatgtatatgtctaggttcattaacatctatatgaatgtgggcaatgctagaaagtcttataatatgaaacggatgaagtatgagatactttttat

SEQ ID NO: 78133 - DNA, 389 bp, Oryza sativa
  unsure (1)..(389): unsure at all n locations
tctgaagaagaaagggaagataccgaaggtacataatttctgatccactttgatggagtagtgcaaacaaatgttatattttcgctctatttcctaaaggtgttgctaagcaaaggataaaatatttatgattntttcataaaggcctatcaaaagttaattatattttctagtagttggtatcttcttattgctgaatggtctacccatatttagcacccgagtattcttccttttttcattttatctctgtttctattattattagcttacgatagcaattggaaagaacctatggcacaccgatatgcaatatagttatatggctgtaatgatacagtagtttccctaaagcaccaatttggcagttcagatgtatgtgtgtgtgt

SEQ ID NO: 78134 - DNA, 406 bp, Oryza sativa
agcttttttagatttatgcgaagtttgagcaattcatattcaacattagatagtttcaactattaaatggatgcatttctgggatatgtttgtcatgagacaccaatacaacttgtggaggtttattatttaagctgaaacattcgataacatatttcccaagaaaaaataggaatgcaacagtgaaaaaaaacacgtatcacctgcatacctaattccactagtttcgtggaagctaacatggtggctatctgagcaaggatcctgtcattgtgaatagctaacagaacgcagggccttaaatttttggttgatatttttatcctcaaattacattatcatgtctggtccttcattttaagcactgaacacagaagaacttacatatagatctaacttgctgaac

SEQ ID NO: 78135 - DNA, 355 bp, Oryza sativa
  unsure (1)..(355): unsure at all n locations
tatgctcgccgatcagtggtgcctgtacgatctgcagctctgttgttgtcctgtgagggagctcgtgcgcggcggcgagttcagcgacgtgttgcctgctcctcttaccaagcctctccgtggcctcgtcttggtcatgtgctactgcaggaacggcgtctacgtctgcaacccttccaccggcggcgaggcgctcgcccttcccgacaccgagctgtcgtcgaatgcgacgttccggccgtcgntgggacccgggccaccgtactaccgcaacgtcacgtactgcctctgttactgctcagcggcgaaagagttcaaggtcgtccgcatgttcagcgagggccactactaggag

SEQ ID NO: 78136 - DNA, 382 bp, Oryza sativa
  unsure (1)..(382): unsure at all n locations
agcttatatttaatcagatagtgggatntatagcttgcatctccatcaccttccaactaggatgaagtgcatacatgatagatctagatagtaactgaaacccaagtagtgacaagcaactgaattatcttctttcagaaaagaagcaaccgagttttctcatacttgaccaaacttaatgatgtccaggactatctaaggcgtgatccaatccaagaggaggactagtcttgcacgtatagcagctgtccgcaggagagggactggtccctcagttatcagaaagtcgctttagaatgccattgatgcatcaaaagtagtaatcccaattcccaaatgctatataagctagatgatgatcctctaatatctaatcatatgc

SEQ ID NO: 78137 - DNA, 226 bp, Oryza sativa
  unsure (1)..(226): unsure at all n locations
cccaaaaccactgctgcggagctcccaactgccttnttatttaacctgggaaccggaatacgcgcggatgcgaactgacttgtaaaatccgggtattcaaggatttcgctcgagagtgaaatctttgggcgacctcaaggctgaattgcagatggccgattcgccaaccatgtcccggatcagggcagacgcggtcctaagcctgaatatgcaggctgtgtctctg

SEQ ID NO: 78138 - DNA, 380 bp, Oryza sativa
  unsure (1)..(380): unsure at all n locations
agcttgtctttcctctgggccttgtcatgctgaatgttggtcaacaaacacattgttggcaagtgaacatattactaggggtcgctctgttgggaaatattgacctctcggcatggatcgcgcacgggtattcccatccgctgcatgcactatcaacgtgattaattcacctagtgttaatttctgggattacacattatgcgtattttttttagaattcatcctgtagattgacgaagtcaccacatgcgcctcgctattgacggatgtacgtcgccttccattgaaagatcctggaaaattcgctcccacgtggaatcaaacccaggacctgctactcangctctcgttaccattaggctacatgtgatcgatagcat

SEQ ID NO: 78139 - DNA, 456 bp, Oryza sativa
  unsure (1)..(456): unsure at all n locations
aactaagctttcggacggagaagtatttggcctacctacatatttgttttatttgccctgntgctanggtgaccatcctactttggtccaatgttggtcgacacatcaatgtcagttgtgaccaagcattgcgtgtgcctatgtcacacccctgtatgtttattagtaatacttcttttaagctgtagaacgttcaagttgtatatacgtatatctcaatgtactgattaatgtagcgcgcaaacaaacacattgttgagtggttccatcttcttcttatctgttattgtaggtgattggaacatactcataccattttaaagtgcatataactataatagataatgttgctaaagaacactttagtttcattgatatatatgaaaaactgtcaagaatacttatcatggttaatgaaaaccaggctctataagcactatgtacattattttcttt

SEQ ID NO: 78140 - DNA, 414 bp, Oryza sativa
  unsure (1)..(414): unsure at all n locations
agcttaatttacttgatggcaaagctcatatcaaaggttctcgcgatgaggttagcaacactgttggacgacctggtctcaaatgcccaaagtgctttcatcaaaaggcgatgtatatgttaacgaccaaatttggaaatattagcatcggaaaaggagattatgtcaaggtggagtcgaaggcggagattgatccgagaacagagcaagaatcggctgaagtccagatcggctacgattaggatcggctgggtctgagtcggactangtgagccgatgcagccgattctgacagtataatatggtgtatgacattggattgaattgaagtgcttcaagatgattgccgcacatggatagtcctgagaaggcaattgtatctattaattaagaatgtttgtgtaacttccttag

SEQ ID NO: 78141 - DNA, 436 bp, Oryza sativa
  unsure (1)..(436): unsure at all n locations
agcgttatcgacagcctttctgtgcctttgtgtggatccaaagacgagcaataccatcattatgcagggtacaggaggcgctatacaacaagaaaacacaccacccanaatcctattaaaagaacatactccttccgtcccaatatgtagcaacatagaataggatcagaactaccctaanagtatgaatccgatcttatatcctagcttgctacatattaggacggagggaccatattataatggagccaattagctatgcgtataaaactagaccatcacaccaccagtacatttccgtcaactacgatcttggctnntatttaattgcataactaccacaaagtnttgctactgattcctcaccacgtaaactatgctactcatagttgacatgtcggagtgactatctntgttggcttgtcatggcttccta

SEQ ID NO: 78142 - DNA, 224 bp, Oryza sativa
ttagcttgctctggcagctggaggaggaagaagacatatatataggggtgggactttagtcccggctggtatcaccaaccggcgctaaagatcaccgggatctttagttccggctggtattaccaaccgggactaaagttacgatctttagtcccggttggagtttcctttcggctactcttgattctcgggttaagtatttcgggtggggtcggcctaccggg

SEQ ID NO: 78143 - DNA, 403 bp, Oryza sativa
  unsure (1)..(403): unsure at all n locations
cagcagcaatcaattttgttggcgaaagntacagntgctcggccattgtagcagctgcagcactagacagttacaactcgtaaaatagctactgctgccatccattaaggttatggcgatgtgcagcaatgttttctgcactagtactgataaagaggcagactcgaagtttctgctctggattcaaatcgatcttttggatcagaattcaattgctgcaactacaacctccaattcatctataaccaatctaatagctcattcatacaacagttatatactacactattaatatctagtcccacctgtaatagacacactgtatcttggagtctgtgctacagctaactacanatctgtagctcgctactcttctctctcctaatntatcttcttaaaatat

SEQ ID NO: 78144 - DNA, 343 bp, Oryza sativa
  unsure (1)..(343): unsure at all n locations
atcttccctggatctgggaagtttctctttcacggtattgggatcgtttgatcgatttccttgatcgctacttatgggcgtgcgctcaaaggatacaaacagggattcgcaaacaaaaaggggaattcgtagtcactttttcctgtcgcgtaaaaaaaaggctttacgcgagagcaatagaggttgggatacatctatctcttctgagcaacctcttttggattcttaagaccacccttgcagtaggataccgtctgctttgggttctttattatattatctccttcgagggaattttaggatcgttcangctatatttagtctagtttggcttttactgtct

SEQ ID NO: 78145 - DNA, 463 bp, Oryza sativa
  unsure (1)..(463): unsure at all n locations
ntatgttcggcgcagtactaatactggaacttatatcaagaattgctctatcaatcaccatctactntagacatatcttctgaaactnttttcaaatccaaaagtccagtatcttcctacaaattagtgaattaggaggagctctttgtgccgaanaagaaagagcagggcaatatttcaaacttgcattcgaactgcgaaatatttatacaaaggaggagagatcaagataatgcagcagggttggttatctaattggctagtcaaacatgaggtggttcatagatctttgggcttcgatcatcgaggaatagagactntgcaaataaaagcagaggaatgggattccattgctggcattntatatngtatatggtacaattatttacgttcccaatgtgcttatgacgttgcacccggtggatctttagctagcgtgtatcatcttacgagaatacagtat

SEQ ID NO: 78146 - DNA, 425 bp, Oryza sativa
  unsure (1)..(425): unsure at all n locations
agctctncttatttagagctattgagccattatataccttattctattatggatcttctacggttttatttctttcattcttgctcgagccggatgatgaaaaattctcatgtccggctcctttgggggctggatcttaaagaattcacctatcccaataacaaagaaacctgacttaaacgatcctgtattaagagcaaaattagctaaagggatgggacataattattacggggaacccgcgtggcccaacgatcttttatatatttttccagtagtaattctaggtactattgcatgtaatgtaggtttagcggntctcgagccgtcaatgattggtgaaccggcggatccgtttgcaacttctctggaaatattacccgagtggtacttctttcccgtgttcaaatactccgacagtacct

SEQ ID NO: 78147 - DNA, 474 bp, Oryza sativa
  unsure (1)..(474): unsure at all n locations
ctcagctgatcgattcccctctgaacaagaagttctggaccgggaggtataatatcaatctcttggcgtccatccgatgcatcgactatggatatttcatatccccccttttctttacgcagtanttttcttactacacctgttgacgttgcattatagaccgtattgttactcttgctaccatcaagatagatctgtccccttcctcgggtttcccccacatatatgggatattctaagaaatgaacgtctttcttcatagcacggtcgggggaaagaatgggaaagacgatttcactatatttcttaccgggaacacgggctatcacaagaatatnnttttatcgtgacgactactctgaanagagaaagttctatcttttctttaactcaggagaatatcggcggcggnctaatttgaatccctcggcaaataaaacagaccccattaacctcctttttccttacaagact

SEQ ID NO: 78148 - DNA, 263 bp, Oryza sativa
  unsure (1)..(263): unsure at all n locations
agcttgttttatgtatngaataaagtaagcggtcttacctcgagataacatgggactgacccgaggagtgatccggccacacccgatgagcatgaacgactggcgtctgacgacaccctcgaaatttcactgttcatacgaactgcgtgagttaaacccgggaacttcggctacttccgattcccgaaatatgcgatagaacaaggattctctttgttaaaatctgacaagacttatcacacttgtgcggtcttgactactct

SEQ ID NO: 78149 - DNA, 128 bp, Oryza sativa
ctaagcttggagatttccacaatgcaatgagtggtgggctgagcactctcttaagatgttgactgctggcgcactgctatctatgacatccagtcgtgaaagaaaacaccgagacaaccacactgttg

SEQ ID NO: 78150 - DNA, 268 bp, Oryza sativa
agcttcatatttgttaggataatgattagacaataacaaatccagcaataaagccatttgggaagacgtcaaagtatgtcaagtgggataagttggctctcttgcgaagcataaatttaaaggccaagttaccgacccttgcatccaatagcagaagtagctagtacccggagagcctgaaagctaatttcaggcaggatggggctagctataagtatcatgacacgcatggttttctcatgacgacctgcatggtgtctcctaatga

SEQ ID NO: 78151 - DNA, 285 bp, Oryza sativa
  unsure (1)..(285): unsure at all n locations
attcttcttangacgctgagtatccacaatctgagatttctcgccactttctgaatggtctcgctatgtctattcgggagatgaangntacatctattcacgagcctgctcatatgcctactctgactgtggattcactttacactcaatctgacacacatgagacgaatgttctttcttccaaagctgatactacagctagggctctggtttcttctactacttcttctgtggccgacgctttttcatctatgacacttttctatgtgcctcttctgcacatcc

SEQ ID NO: 78152 - DNA, 416 bp, Oryza sativa
  unsure (1)..(416): unsure at all n locations
agctntacaacatgtactcatgggccctaaaattccttctagatcagcatctagatccatttgaatgtcaagaggcctgaatccgaatctaaaatgtgtagaactttatctcttgtcttctatggaccaaaattgacgtggtgagatagaagtggacttggagaagatcttggtttggtccccaatcaacttctttgatcatccatgcattcctaacgctcggactctttttccttcacccaagtaagtacatctccaaacgagaacacacgaaactcattatgtagcaatatttgttcaaatatataacaagtaaatctaatatagaacatatatacctttggttgatgaatacataatgtagttatggttatatccgagctagttgtgttctcatcacccctcctaanaaaaaa

SEQ ID NO: 78153 - DNA, 488 bp, Oryza sativa
  unsure (1)..(488): unsure at all n locations
tactaagctngtgacatgctgcaccggcgggtcctacgcacaaatcacaagttcctgtttatgaaggcagagttcgatggtactgaagagactgatcctgcaccanaacctacatcgggagaaaaggtgtgtgcaatgacagagaanattgtttgcgagtttggaaaaatgactaagaaaccatcaaaggggacaaagcgcaagatacctgagaagaaaacgaagggaggggatagtaagaagcaagatgacagttcgaagccagatgataaactccctcccccattcaataagcattccatagtttttaagtacctcccgtactggaaagatctggaggttcagcatgccatagacgtcatgcatctagagaagaatgtgttngacaacatatttggaacattgttggacatgccgaagaagactaaagatggtcttgcatcaatgatgaacctagtcgagatgggaatcacggaagagttacaccc

SEQ ID NO: 78154 - DNA, 423 bp, Oryza sativa
  unsure (1)..(423): unsure at all n locations
ttatcttgagtctagctcanacttagtagcgggaactggctttgtcatcatatcagctgggttatcatgagtacttatcttgcataccttgacatcaccttcagcaatcacacctcgaataaagtgatatctcacatcaatgtgctttgttctctcatggaacatctgatcctttgtaaggcatattgcactttgactatcacaaaatatattaatgcaagacgtaactccacaaagctcagtgtacaaacctctaagcaaaatagcttctttacaagcttcaaaaatagccatatactctgcttcagtagtagataaggcaacagttgcttgcaaacttgccttccaactaacagcacatcctctaatagtgaaaacataacctgtaagcgatcttctcctatccatatctccagcaaaatc

SEQ ID NO: 78155 - DNA, 439 bp, Oryza sativa
  unsure (1)..(439): unsure at all n locations
cagtccacagtntctgagaatctgtagttacagattctacaaaatgaaataaaaaaccagaagttggagaagctgggtttaagagcttttccagattcttagaaactggctaccaaacagctatttatcagaatctaaggctcccaaacagaccctacagagcttaaggtttctgtgtatgagttgagctgagctgaagaagaccactgtgcaaaaacctggtgactcctcattgntgctgaaagaggacccttggatagctgtcatagatctacccactagattttgctgacctcaccactgtccataccttcccaatgttgcattatttccactgtttgctgagaaagtgtcccattcctctactacttcatcatncccatgaatgacatgtgaagatggtcaattcttccgtgtaaatactacagtagtatacagg

SEQ ID NO: 78156 - DNA, 418 bp, Oryza sativa
  unsure (1)..(418): unsure at all n locations
agctttgattagaactatttgattgcagaatgtgtaaggaaaggaatgatgtccatatgtatgagactaaattcggtgcaaatgttatctagtaacaagtttacctctcttcttttttcagctctctcatcacatttgaatgcaaatccgtacgcaggagtgctgccaaccctttgaggctttactttttcacagtttggctcttcttcatcatttttgacagaacattggtttgatgttttctgagttttcttcttttccctgngtttgatgaggaatgtgtcaatgcaagaaacactatcaatatgagcttcaattggtagttggtagaatggttcacaaaaaaaataagcctataagcaaagagtattcaaacaagcttaaactgactgaggtctcacaagatggaaaagcttat

SEQ ID NO: 78157 - DNA, 242 bp, Oryza sativa
gaactctgaaatagtattttacataagcctgaactgcttttctgtgtacaggttgcatccattgtatctaatgccacaagttcaagtttctcaacatctataagtaaggttaaaccacaacaggtatggtaatccacgattcaattgatcaccattcgttcaaacattatttgctttgtcccaaacatatctttcattctttcctcgaatcttaattaagtgcatacttctgagcaattcat

SEQ ID NO: 78158 - DNA, 416 bp, Oryza sativa
agcttgaataggaaattgagggtttgagctctgagatttcttcatacaggtgaggttttctgctatgagtgcatggtatgtgttttacaaggtggggagatcaattgataagtgaaatgggcttcaaatataaatgtgaaagaaagtttctggtttttctcacattggcattcttgaaattgttatgcgaaaaaaatatgtgagtcttgtgttaacatgcaaaaaacatgacatgagtttaagtttactgaactcacacactgatcatccgagggtactgacagtgtttcctttacgattttcttttactatgcacaggcgcaaagtttctagtctagagaaggagcgtcaacatcttcaatctactgttgaggctcttcaagaagggtagtaccgttttactctgatgtaaactt

SEQ ID NO: 78159 - DNA, 489 bp, Oryza sativa
  unsure (1)..(489): unsure at all n locations
gcgggaaatatattccctgatacatcttctagcataaggattacaccaataaacttggagaaccatccttctaaaaacactgaatgaaggaagcaaaattccagattgcatggagaaccatgcaccaataaaagatgcaatcgttggggacttgtggcattgccgcgactatcatattctanggcctctatagacgtgcttccctcttgacatgtcaacgattcctatggctactttcacggattcggcactaattgagatttagagttgagtcgcagaaatgtttggtgcttcactggatctaactcaagggtaccacggaggtccttgtcaaatntgaggatcctgtcgaacaaagtctaatagattatcagtgctcaatccaaatgttattaagatcganggaaaaagtttcaagaaatactgtaatcaacagaaggctattgagaattgtcatgtaccagagcacacgtgggcagttggtacact

SEQ ID NO: 78160 - DNA, 419 bp, Oryza sativa
agcttgtttattgaacgactgccaaatacaaattacaacttcatattgctaaatcttcatatatatagttgacgaaaactatataacggtgtttctgagtagtggcctaaaagtattgcatatagtatattttcctcgtcaaaccagaaaatagaatcttgaaaatcagcgctcgatcgttatgccgacaggatcattctcacacacatcaccatggatgaccgacttcgaaccaaagctgagaatgactgaattatatatcagatgcttgctcagatcgatcttgccgtacatcaccacttcatgctggcattattaatgattaattaataatgttggtttcacaaagggtgcaatcatcttgacctgaatatgtcaactcctaactgttttgagtcaagggaataaataactttcta

SEQ ID NO: 78161 - DNA, 508 bp, Oryza sativa
  unsure (1)..(508): unsure at all n locations
tgccatctgcagatgaagcacataagaggagaaatcatttatatttcattctaagacaaaaaggatagtttaaaggtaagaactatcattgaaggtcaaattcttcagcatatgtagaactctgactatccattatgacacatgtataactaaagcattattgccaaaattacaagtgattacatgcaaaaacacaaggttatgtaccttcatgtcccctgctctcctcccaaatttctgggtaagcagaggcaaggtgtcgatcatcccctttggttccggaggtggccgtccaatttcagcgaatgcttcccttattctggccaagtcaaaccttacgatgttgtgaccagcccagacacgccctattgagaactctcaagggtagaacattatcaaaccaactaaaatatggcagctatttatgctagctatacacaaagacagcgtttataacctctanacttcagtgctactnttcaacgtaatgaacagaaatcaacaacta

SEQ ID NO: 78162 - DNA, 420 bp, Oryza sativa
  unsure (1)..(420): unsure at all n locations
agcttttctagggattaggccacattttgccttattccgccgcatcttcttcctgaagccccagccaaacaagaacaagccgtgcgtcgttggtagggggaccggttttcagttaaggggaaccttaagccagaaatacttctccatgcccttcaaaacctcaaacaagggctggcatgcaaactggttttatgtgcaaaatcctgagctagcactccccgagtactcctgccttcctccaacatatcaagacacccggaactcgcttccaatgggagatgaggctgcccaagcactttctttgatggaacgcatgttgaaacttaaagagcagggtctgcaaggggaacaaatcacccggcatttcatcaagagccggctggcacctatcanagagagatctcgcactgcctttgagtt

SEQ ID NO: 78163 - DNA, 423 bp, Oryza sativa
  unsure (1)..(423): unsure at all n locations
tgaacctatatatcagaatatggcatccatccttttgttntctctgtccatttatcttctgagaaagtgctgtgattttcttcctactaatttagaaaggcaaaaggtggtaaaccttacatgcgggatttgaaatttcggtaatttcagcacccaccggaaaggtcaaaatctccctgaaattttcggttnttgccaaacatttgtaaatttggtcaaaatttgttcaaattcagtcaaaatatgttataaattcaaaaaaaattggacaaaaaattctaaaattactgaaatttcggtgatttcggttggttcggtccctagcggcaaaaacacaatttctgaaacaaaccctgcttacatgtgcaatattnttgtacttaagttcatgcacattgtagtggtctcttttcatcctttctt

SEQ ID NO: 78164 - DNA, 392 bp, Oryza sativa
  unsure (1)..(392): unsure at all n locations
agcttactttctttcagagcatctcggatctcattagattccgctggcatggatacaaaaatcaagcaatgagttaattgatgatgtttatttctttttgcgagacaagacgatgagtattactatgattaattaaataaggtagaaatgctagcaggttatgaaatttgtacagggagggatgtggaaccaatatacaaaattgactagcatgaagcccatattctgcttacagtactatccttactaactatttgtcaactcttacgaataaccactctccaaatgccacttacgattgtccttacatttttgccaccggagagaaattntcttaacaatntgcccctttcaccgatgtggcataccaacatggactgaggacgtgaatg

SEQ ID NO: 78165 - DNA, 467 bp, Oryza sativa
  unsure (1)..(467): unsure at all n locations
aatatcaatcctctgatcataaggaagccccagaatgagctcatgagctcgatatgaccgtgattgtacatagagacataagttgtctgtcaagaagcaactactctcaagatcgataaccttaatttcacatctgctgtagctcttgataaggatgatttcatgcttcaggtcacaatgaatgatccttaaatgatgcacatataccaaggcttctaaacattgccgagctattgcctganagaaaagggggaacttttgttcatcagaacctttattcttaangttaaattaattgcacttagaacagttaatcatgttatttacagcagtatcattcctagataatgatcaattactggtcacaaactttatgtntaaatgaagcatatcaaattggtttggaacattgcatatcgtgcatactacanattgaactgtaagtgtctatgcatatgcaacaatta

SEQ ID NO: 78166 - DNA, 405 bp, Oryza sativa
agcttgctgttgatgaggagccgcctatgaggattgtcaagaactacaagaggcctgaggagagaatccctgcggagagggacccaacgaaattcgttgtctcaccaataactggggagctcattccaattagtgagatggaggagcacatgcgcatctcgcttattgatccaaaatataaggagcagaaagagcggatgttggcaaaaattaaggagacaacacttgctcctgatgatgaaatctccaggaacattgtgggtcttgcccgtaccaggccagacatctttggaacaacagaggaagaggtctctaatgctgtcaaggcagaaattgagaagaaaaggatgaacagccaagcaggttattgggatggcattctggtgcataagtctactgcacaca

SEQ ID NO: 78167 - DNA, 418 bp, Oryza sativa
agctcgtacccgggatccttatagacacctgcagcatgaagcttttttatgttgatcttgtaagagattagcccaagtataagatctctctgatgactccaattctctaagattcaaagtggcaattactgcattgaacagaaatggccatctatcgttaaagttatcattatttttctcctgtgggttaccaaatatattatagacaccacctacaactgtaggtatgggttctttatagcaaactctgtcttattcggagagaaaatgaccttttatatcaaactgtgctggaccatatacagaaatctaattaaatttaaaatcatctgctctctgtcttaatattaagcgaatgaaaaaatctccttcttcaatttcttccatgtcagaaacagcgcatttactaccttaatca

SEQ ID NO: 78168 - DNA, 339 bp, Oryza sativa
actcttttccctagcgctctgaacgtgacgttatcagcagcgtgaggagttctggcattcccgagatctttatagagaactgattgtatgacaccatgtcatcgcaatcatggttcacaaacaagttgacgtcaataaatctcatatatgtacctgtgcctcggtaaatatcacaattgcccttcgcggcataaaattgcctcctgcgcgaggacttaaattagaaccactatacagaggtaccacccttgctagataaattaatcagcttggtctatgcccataccagaattgcggtcgtactcggatgttctttacatgtactcggcacgtttatgt

SEQ ID NO: 78169 - DNA, 218 bp, Oryza sativa
ggatctttagcaactcagctgcaccttctttttaaatgacattttggaaccatacatcagcgttttccacacagaaatattttataaccttatttgtggaatcctttctataaccccttagtgcgacactttaaaagatgccttcattctaatacttttaatcttttattgaaacagaatttatattgttaattctctgaacaccatcttcaaaccat

SEQ ID NO: 78170 - DNA, 408 bp, Oryza sativa
ctacataatgatatatgacttgatagaatgaaattctgatctgttgttaccagacaggtcgggtaaaatctcatcatatggtctattggctatacactaatatacataaatggattcaattgcttagtcagttctctgagaaacacattttctttaaaataaaatgttcaggttgaaagtgatggaacacttattcctgctacagaggatgagggcttacagtttaaaatttccttcttatgagagagtgataagatctcgcttctattacgatgaacacatgtggagaatatttactatgattgatacgaaaagcctgattgaagtgcctcaaatatattcatctcaatctacttattgcattctgttggtgacaacttctagacgaactgatatatgcagtgagat

SEQ ID NO: 78171 - DNA, 447 bp, Oryza sativa
  unsure (1)..(447): unsure at all n locations
agcttcgttattccgactcccgagacaccccgattccgaattcgcgcacctgggcgaagaaggagagacgacgcgcgattctactccaccgccgccgccgcggggaagaaaccctcgccgctcgccgccggcgatccgccacgggcgcagaggtgaggcctgcctccacgacctttcgctctctcctactcacttcgcctcccctccctccctcatttccgctagctaagcttntcctcacgcgcgcgcacgctctgcacgcagggggagcgccgccgtctcctccgtagtttccgctagcgcgcgctcgtctgcacggtgcaccccaccgcggctaattataagcttgccgcaactactaaccccgcgcgcatcaagaatactccgtgattaagccatttttagaaagtaattaagccatatttaacatgttgtatagttaatatt

SEQ ID NO: 78172 - DNA, 322 bp, Oryza sativa
agctatgctaggtaatatatgcttgtgtgtaaatccacaactctgcgctgaactaaacacaacttttcagtcacatcattttcaatttcaaccaaaatccaaactctgcgctgaactaaacacaaccatagattgctcgtgttcgggctccttttcgggtaacctgctcggaatctttttaatcagtttagcacgcgagctatatagcgtagagaccaccggctgtctaggaagggaggtggtggttgccgctgcaagccacattgaatgaacggacgcacgctggctgtatgttaccgaacatcttaatgccgcgatacgc

SEQ ID NO: 78173 - DNA, 252 bp, Oryza sativa
  unsure (1)..(252): unsure at all n locations
actcagctagaanctactgcggcttaatacacactccaagcagcgngaaagggctgatctactctatactctcaacaagtcccgaaaacagcaacgccagcttaagaccaaagatagccctccttgtgaatggactccagaaccaaaaatgtgctttagatttcatgccactgtctcactgacccatccatgcaatggctgtcgccattggagagcatcagaatacattcttcttctactacaaataatggc

SEQ ID NO: 78174 - DNA, 426 bp, Oryza sativa
  unsure (1)..(426): unsure at all n locations
tatctttgtcacctgtataataataaaaatgaattntctacattctgtttatcacaaaagcactatgatggagcaagtgcatttaggccttaagaaacatatgacatgtacataataccaatgagtgaataaatacaagttctaagattctgccgtatcatggacacagattgtggtaaaatgccattttaactgagtattaaataacgatggactcaatatatcttcacatatagtataggcatgaacagagtaacagtatcacactattatctcaactacttgcaaaaacaaacagctaaactaaatatctacagacagtgttaataacaaacaatacccgccactcatagatgtacaatgtgtcacctgtcaaagcaaagagaagataaactgtttttcagctgcagccaagaaaattacctc

SEQ ID NO: 78175 - DNA, 258 bp, Oryza sativa
tatcttgtgtattgacatgaagcagatatgccatgggaatctacaatcggctcaaaaaggattgaattgttagatgagttgaccgcctatgagtattataatcttatggcagatgaaatataagatctagtttagtctttattgagagcccttgctaaggttaccaattactctcccttataacacaaaagtggtgtctaagtccttttcataaagggagtagaattggaaattgatcctgcccataggaactcgtga

SEQ ID NO: 78176 - DNA, 440 bp, Oryza sativa
  unsure (1)..(440): unsure at all n locations
gccatgggcttccttccatgatactgaagagaacttgaatganatggtggcgcacgacgttcttccggcaaaagagatcatctgctggcgtccagcgtgtggcgaagcattcccaactcctgacatgcatganagtcgggtattctcccatttcttctacgatggattttctcttccaactttgaaattcttcagggggattcttgagtattatgggaacagcttgcattcatctaaccccaatttcatagttcacatttgccaactttatccacacctgtgaagcctatctanggattaagccacacttttgttctgttccgccgcatcttcttcctgaagccccagcctaataatagcaagccatgcgttgttgggggtgccggttttcagctaatgtgcactctgaccagatatatttctctatgccttttcaaaca

SEQ ID NO: 78177 - DNA, 327 bp, Oryza sativa
cttttctataaagacacggaactgagaatgcaactacaacacactgccaatttgatcgataattgtagagatacagatctgtgcctactaaaagtgataaggccgtccagtcatgtaaaggctaatagccttatatgactatggaataagtaatcactgttatcacccttaacaaagaaaatagttggtaaatgtatataacacatggggtgtagttattaatattcgggtacaaaaccacacaaatatattgtattttataagatacaagtctggttggaactgctggagtacattgacaatattcataactgcaccctgcacatt

SEQ ID NO: 78178 - DNA, 276 bp, Oryza sativa
cttttacaatacattgggatatttctacatgtagatctcaattttaaagaatttatagacttgaaccaacttaatcggagctaagatgaattaatatgaatatttgaagattaaatccgattaaaacacgttaattgatttttattggattatgacgccataatgaattatttttgaaaaagagaaagaaagattattgcgtcatcgggctatggtgttggtggacccggcgcacagcggcggttacgagaacggacggtcatatcaatccattca

SEQ ID NO: 78179 - DNA, 434 bp, Oryza sativa
agctttgtctatgaccaagaaacatcttgttacactgtgacttaagaactgtaattaaggtgccattgaatcaataaggtattgcacatgctgcaaactttggctgtgtacatctgatctgggcgtagagtacaggctgccaggctgggttgttcttttatctaaaagacatgctgcaagcaagcattggcctatttacacttcataatctttcttgtatgcatcttacaggagcaccgtgtggattttgagccattcattgaggacgaggaaccgtttgagaaatattgtgactctatgcttgaggatgggacttgggctggtcatatggagttgcaagcagcttctattctcaagagaaaaaacatatgcatccacatggtaattttcaatacaagctttgcagtatgatttcttcaacctatgaataacac

SEQ ID NO: 78180 - DNA, 429 bp, Oryza sativa
  unsure (1)..(429): unsure at all n locations
agccttgattctcctcagcattacctttagcttcagcccaagggtgctgctggtatctcctcaacatctccaacctctctgctacctctttcatcgttggtcgttcttcaccgttcatgcttangcatcgcatgaggaggtctgcaatctctgttgccatttcgtcgttcatctctttcctcacttggctgtccataagctctcgatgacgaccagccttcactgctgtggtgaagcgtgacaccaagctcatgtcttcctctggcccgtctaggtacaatgccttcttcctggttagaagctccagcacgacaacaccaaaactgtagacatcgctcttatcggttaactggcatgtcattatgtactcagggtccaagtacccacaagttccctgcaccaacgtggcaattgcagcctcatcagttg

SEQ ID NO: 78181 - DNA, 485 bp, Oryza sativa
cccttaaaccagctattcttagtactgggggaagacctatagggactgtctttgtctgccaatgaatgaaagctagctaccactaatgtaatcggaaaaatcgaatgcttataaatagatatgtaacttaagtgaatgtctacttataaataaacacacctaataaacatgaaaacactcttagaaatgtggtttagtcatatagttacacaacaaatttaacactcgtagaaatgtgggttagtcattaaaagtacacaacaaatttaggcttcagtgtaaaacttatgacaaatttgggatataatcatcgttaatggatatattctaataagacgaacatattatagttgtgataataaatgtacatattttaaaaaacacgccttatccttggtgatgaacgcctagctaatttattgtgatccgcactgtgtaatgatgatgtttataacagtgttttataaagttatttaaaatcaata

SEQ ID NO: 78182 - DNA, 335 bp, Oryza sativa
gttccggctataccgtgctctgaccttcttgtatgaactgccgtgtgtgcttgattggtcatgtactactacattattaacaatgtatgattggcttaaagtacatctatacttgaacttcctcaaactataatgggtgtgttaaaatattttgccatattaccatataagcgtggacgcttgaaattaagctgaatgcctgaactcattgtatctgtgaagctgtgagtgaatcacaactagtgaatttttatctcgtgctagttaaaagaatcatacttctagtgggagattcatcaccaccattacgtctcttatatactaccctcattcca

SEQ ID NO: 78183 - DNA, 440 bp, Oryza sativa
  unsure (1)..(440): unsure at all n locations
tcttctgcagccttttctcctaaggctacattctcttgagttcttgcagctgcaaggatacaaccccaggctaccacatcagctttcattggcatcgtcttaataagcaggtctgcttcttccaaatacccagctcgacaaagaagatcgaccatgcaaccatagtgcttaatttctggttggattccatattgttgcctcatggactcaaataggcgcttccctcagctaccattccagcatgacaacatgcantttacacaccaaggtatgtgattgagttgggtgtaatatgggtggtgctttgaactgtgaaacaattccaccacatgttcacatacctggatagctaatacagatgataaattccaggagacactgaatgacttatcttaacatggtaaagctgactgctcagcatgctatacactttgataccg

SEQ ID NO: 78184 - DNA, 433 bp, Oryza sativa
atatattgctgcggctctatactaaatatgctatatggatgttacaaaacatgatattgccggagcaaagctgcgatgcatggtggaaaaacatatgcttattatgggctcttagcacaacatgcaacgacctatcagcttttttttaactgagtacatcagtacatgtcatgattcttcatatgaagctgactatttgacttacacggatgtatctggcacaagtcacaaaaggagaaacacacagcgtcgttacttaacaacaatgatcagggattattaattgaatgtgccttcccattgtttactttgctgattgactatgccctctcatatttctgcacaggtagaagatgacgaattgaagtctctcaaggtctcccacgtgattgtttctgatactagagtgagtaattggacatatggccttgtc

SEQ ID NO: 78185 - DNA, 440 bp, Oryza sativa
  unsure (1)..(440): unsure at all n locations
agctttacaacatctactgtgaaattggataagaaccanagcttgttattatctcgtggatagcagacatcatgggtactggatcagttaccgtgaaacaaaagaagcgagtgaagcacacttagaacaagtacttgaaacctggtgctctcgcccagattcgttatagcaggagcacaagcagggatatatgaaagaaaaggattctgttgaatgtggataaagatgagttaccgcatgaggaggttgcattctaaaacactgaacctatgatgtcgcctaaaaggctcaactctgagccatttattggaactaaggggcaggtaatgccaataactccacagactcctcagtcagatgaattatctgatggtcattccagacttgaatcactttcacttgaattgctggatggaaatgaaactgccttttaaatctta

SEQ ID NO: 78186 - DNA, 389 bp, Oryza sativa
ctagcggcggcgcgggcccgtccatggcgaagctctattctatcacgtaatggcgcgtgtggaacggccccgtcgacgacaagagcccgacgtacgccgtgccgttcaccaccggcgagaggtcgacagcgacggagatgaagggcctcctcggcttggtcacctcgacgggcgccagcgtcacgttcaccaccgcggcgcggccgtcgtagtccacccagaactgcatggcggcgccgctgaagagccgtaggttctgaacgcgccgcccgtggcgtcgtcgtaatactctgccggctcggcggcgacagacaccaggccggtcacgtcgacgccgaccgggctgctgttgatgtccccgaactcctggttgaggatggtgtcgagct

SEQ ID NO: 78187 - DNA, 444 bp, Oryza sativa
agctttgtcgtgacgtgtctcatgtgttgggacgaggctcatgtgttgggtagtcgcggagtgcgggtaaagtgtacatacactgcagtgtgagtaaaccaaatctattcgaatagccgtgctcgcggttattgagcaccgggacatgtattacacttggctagactctaaattcttaacttgtgtgggatgggatattgcatgatgaatttttatgctgatggagccacttcctaagaggcgggaatgtggacgttctcatataaccataacgactcaatggcgggaagctatccttgggatcacaatggatggtggacagaaccgtcattatttaatatgaacactggtattaaaacttgaacagtctatgctaggtcttatgcttgtgaaaagaattacaaaacttgcgttatgcaaaaagaaccatagccatcctttgaa

SEQ ID NO: 78188 - DNA, 453 bp, Oryza sativa
  unsure (1)..(453): unsure at all n locations
cggggcgatctatgcgaagaggaagctgataacattcttgatgtgctcataaggaacattgacatcttctcctggagccccgacgacatgggaggtgtttcgacggacctcatcatgcaccatctggcagtcaagccagatgccaagccaaggaaatataagctgcgcaagatgtccgccgattgccaagaggcagcataggctaaagtgcaaaagctgcttaacgcgggggtgaatccagagatcgaccaccccaagtggctggcgaatccgcgtctggtgaggaagtcaaacggcaagcggcacatgtgtgtcgatttcacagacctcaacaaggtgtgcccgaaagacgactnttccttaccgcggatcgaccagcttgttgattcgacagctggctgtgagctcatgagctttctcgatgcatattccgtctatcaccagatccacatg

SEQ ID NO: 78189 - DNA, 430 bp, Oryza sativa
tagcttgtgacgtcattaatcgatgagtacgccctgctgggctggcgcgccatgctgactgaagtcaatctgtcaccgaaaccaggcctcgtggatcgcattaactgcggtgcgcacaaagatatggcgctggaagatttccaccgcagcgcgctggcgattcatggctggctaccccgtttcattgaatatggtgcctgtagtgcggaaatggcaccataagcggtactccacggattacgcccaattggtatggcttgcgaaggtgatatgttccgcgccactgcgggcgtaaacacgcataaaggcagcattttttctttatggctgctatgtgcggaaattggtcgtttgcttcaaatcaaccaaccggtaacgccaacaaccgtttggtctactgcggcaagattctgccgtggcctgaccgatc

SEQ ID NO: 78190 - DNA, 275 bp, Oryza sativa
tctctatatgcgaagaccatattgcctcttcctgtcgcgctaccttacttactctccctctgggccaacctaacctgaccaaatccatgcgcccgaccagcaagcaaagtgggctaatttggagcacaggtgcgctctaaacgctgacacatgggggccacaccaacactgacaaattcaaatctctgttgatggtgtgcctgttgacgtactatgcatgcttggtactcactgagaatcctacgccatgcttgtggctaccatcaactagaccc

SEQ ID NO: 78191 - DNA, 421 bp, Oryza sativa
atacctgtaagcatgctatgcttattttgccttttgcaatcaactactggcagactattctcgatcactcgaacatcactgaaactaaacttctgttccaactagaagcgccagcgatcatcccgacaagacactttcaaagtgttttcctgctttgcctttggactctatggaaccacaagcatgatgtagtctttcgggaaaggccaccagccatttctgcatgcctgcaacgcggattatctgaatacactttatgggctgcaatgtttacacctgatgacagaactgtaatagatatttggaaaggtgtttcttttttcgtatcagactctaaattactgtaacagacctattcctttctaatttaagtgcgatgacaattcacgtgggaaactcctcccccactgagtaatcaata

SEQ ID NO: 78192 - DNA, 427 bp, Oryza sativa
  unsure (1)..(427): unsure at all n locations
tagctttttatccatgctaactgcaaagaggctccgaccatcggtgagaagcttggatcaactcctccttaccggngactatgttggatatcaaaaaggatcatttgttggctcactcctgaagaaacaagggttcatgccatccacgttaaggtcttatggaacacaaaaggagtatgctgaagctctgagaaaggggtccatgaatggaagagtgtctgcgatcgtcgaccagatcccttatttaacttcttttttatccaaccccccatatcataaagaatttcagatggttaatcgaatctacaagacccccggatttggctgtgtaagcttctcaaacttggtcactctgcgagaaacacaattctttcaatttcttttctttttgacaattattatatcgcgcaaagtgtttgcgtgttct

SEQ ID NO: 78193 - DNA, 429 bp, Oryza sativa
tagctttacgtgaacgccaaagcctcgatccagattgaaccaataaatcttctactattagatcataatgttcatctattgtgttttttggatctgcaacaattaatttccatatgtgtgccatagaatcctagaatgaaatacaaagtgtcagttagctaggaagaaccatttttgaaatagttaagtgatcaaaatcagataatctgagctgtctgatgcactgtagtacttcctgactgccttggattctatatgaacaagaagaccgcattatacttttatatctacacactattggagaaaacaaaccaataattctctaggtaagattacaaacatgcatacgacctcagctgtggagttgctgaaatattgcaggccatagctaacaagattcatactcactttggtgcaatgaaggatcat

SEQ ID NO: 78194 - DNA, 368 bp, Oryza sativa
  unsure (1)..(368): unsure at all n locations
tatgggctggcctttaactgaaaaagaatgctgcacatcaatgtngaagttgcttgtgggatcagcactggaattacttgggagaataaataatgtttctagtgtccaacccctctttttcgtttttcgcgcgcacgctttataaatgggtttttacaaaaagtttatatacgaaagttgcttaaaaaaatcatattcggtctgtcttttaaaataaaagcaaatacttaattaattacgtgctaatagcctacaccggtttctatgcgcactgtgcaggctggttacacatgtgacaggctaatgaactcaacctataatcgtgcagttgaaggcacaatactatgtgatattaaatctgacaaaat

SEQ ID NO: 78195 - DNA, 280 bp, Oryza sativa
attgccccgtgatagaccggtaatagaccttgtttatttaatatttcaaaataaattaaacatatgcaggagtaaacgtctgtcggaaagatattgatggtgaagccttaatgtgtctttcataagaaagaaagaacgaaacgatgatgttacttcatattgagtatctcactctcaacagtcaccttctatgttatgaaactaatgcacctacctaggcctaacagaaggcaaaaatagaaaaaacttttgccccattatttacttgctgggttttatt

SEQ ID NO: 78196 - DNA, 313 bp, Oryza sativa
cccaatagaacacccagagagactttttttgtaagagcaaaactgtcttttgggcagcacttaccctcgagcatgcataacagaacactcgacacactttgaaccaacgtctgccatggaaacaccatggctgaatcctgcggttcgcgcagatacctaattggatccctgtttgactacattacatctaacctagttaagtggaaggcactccaaataaaagttataccagacactcctaagacgtagcatgcttctgtggaccaaaatggttaacaagagtactactgtgactttgtatatgaaacaaaag

SEQ ID NO: 78197 - DNA, 353 bp, Oryza sativa
  unsure (1)..(353): unsure at all n locations
tgctacgtcgatgccggtgagcaaatcngngaaagtcgtgagggcgccagcccaatttgagctatgcatgccattggtggaggacaatgtgttagctgctgaaggtattgattgcggaagctcctatccatacattgagctatacaatgccaagccgacaatgacggactcatatcatagtttggagatcacgaccaccagccgatcctatcgtcgcctgcctatataactataagctttgatgacctcttctaccttttttggatccggaagatcgacactggtcttcttatatgctacttcttgtatatgcataccttctatacttgtgagatgactgtactatatctcct

SEQ ID NO: 78198 - DNA, 434 bp, Oryza sativa
  unsure (1)..(434): unsure at all n locations
agcttgctgagaaaggttcatacatgtggtctgtcttaccacttgttcaagctctgcttccaggtattaagtggaacatatatacacttgtgctttatattttttactttttgatccaaatggccaaaaaaaatgtgaatagatagaacatttgttaccaaataatgtacatattcccccatgctcattcatatcttatcctatatataccaagtgatgacaggcctctgccaactggtgtaacataatgacacctttgtttttgtgaatattctgggatttattctttggcctctcccgtggcatgggcctaaggctntgggatgaatgtaatttactgcctaacttcacccattcgttgagttagagaaagggaattcctgcagttgcataatcgtacaacacagatggctttgttgactggtgtcactgat

SEQ ID NO: 78199 - DNA, 84 bp, Oryza sativa
  unsure (1)..(84): unsure at all n locations
tatactctctatagcgaaggaagttccacaatggtactaaattatgtatgggcatcactntcgcacaaattaataaaaaatggt

SEQ ID NO: 78200 - DNA, 392 bp, Oryza sativa
  unsure (1)..(392): unsure at all n locations
attgtttttcagatgtagactaacagatggtgataaaattggccccataccaaacgcatagcgttagctctagcaaaacctggcgatgtttgaactcgacaggttcagtttaaattaataaagagagctatatggcgaaattatccactcctagcttgaatttgctgccacgagttaattaatactatgactagctggtatttaaaatctcaaaaatcttgggggaggatccatgtattaattcttttttttcctataaaccctcttatgactcatttgcaatgtaaacattatctanggctttgatatgatgctagctcaaattgctcttactagtacaaatccattagtattccttcatcttcaaagaagccatgagtttttaattatgg

SEQ ID NO: 78201 - DNA, 394 bp, Oryza sativa
tccttgagcatgaactagataacactgccttatttttccgcttgcccgaaagaatgaacagattaccattggtcatatgcctacctgctgcaatgtgatctacaaatgacaaacaactatattaagctaggatcattgttatgctaccaaacacatattgtaccacaacttctatatgagcaaagcgtgtagagatagacatgggtgcactgttaaaacagatataacttgaatgctcaacgcttgcatttgcagcaagttcaacaatagagtatatatttttctgaccaaatctttctagaaatctaagagcagtgagaatatgtgtgaagtatcaaaactaaaaatcaagcaataatagacacacatatctggagatattttaaccaacatc

SEQ ID NO: 78202 - DNA, 444 bp, Oryza sativa
agcttctttgcttgggttactcatgcagccacgggtgggcgatgcactggctcgtctctctaacttttcgtcctcggtctaattgcctgaatggccatcgtagcgtcacctagtttcaccggtgagcatgtgtcgggacccggttttataacacagggatccacatgtcttcacaataccaactacctagatcggtaggttggcatacacatatataaacatatctgtgttgatggaaaacacgtggcctgggggatctgcttaactccagtgcaggttcaaaactcgccttcggatgtatgagcgtgctagttgatttgatccttgcatcaacaagaaacaaagacaaagaaaccgtgattaaatccataaatgatagtcgatcggctagatgccgatgacatatcatttatctttgagccgatgtcatatgtgaatcgatcg

SEQ ID NO: 78203 - DNA, 484 bp, Oryza sativa
  unsure (1)..(484): unsure at all n locations
gtctacgtggagtcctggcttataccctcatttagcgcctgtgaagaaggagccgtangcccgctagtccgctgctgtttattattgattgacacgcctggagcgcctttgtaataatgtaaatactatcgatgtaataaagatgtgtctcttatatcatgtctgtgtggtgtaccccggcttttcctgtgacggtgattaatacactagcgttcgggaaaaggcaatnttcccggtcgggacagaaaccaaattcttgccactttgattttgcagaagcaatctctctcttcttctgtttatgagctaatctgaaacaaaaaccaacaatgtgtccatctttgccacacacagaacaagtgatattttcacgatgattagacacattggtagcattagaagaattagcagcacaagcaacaccaatagattntgcatgcacaacacttggatgttgaagaaaatgcactcatagtatacatga

SEQ ID NO: 78204 - DNA, 304 bp, Oryza sativa
atactctatagatgacctgtcggcatgtctatcttttattgataaggtcttcgccaacatatctgaaaaaaatggatcctgagtggaaatgaatcaaacatcctgcatctttcatacaaacccactacagtgacaatggtcttgactgaaaaaccacaagctctgttatcaagaaccttttcttttttttcaacggcgagaatacacccacttctttttttaaaaatgaacacacactccgagtctggaattaaaataaaagcgagccatcacgtcttcgactggactgtgataacacgaacta

SEQ ID NO: 78205 - DNA, 482 bp, Oryza sativa
  unsure (1)..(482): unsure at all n locations
accaanaaactcagcttgggactgcaacacgccatgtcgccatcgaaagttcttactttcttcatataggattggtctactaaactgaacctaatatatatgcatacaaccaacaacaaatatttcagtgaatttaaaaacaaacacagaatgaaatcttgatcaattaaatctaacaactttgggctggcttgttaagatgaagacatgaagtttgctgaattctttgctcgtagttaattatctgaatctttttaaaagaaaactaattcttatacattgaatgcttcttaaactgttccagcagagaggtgaaacatattatcaacatctattataatgaatgcgaatntggcatcnatcttcttctgctttgcctccccccaagtgaatcatgattaacgggatcttactgggatggctgtataagttggcagaagcgttctaacctcgttagaggccgctgtacgtgttaatatatg

SEQ ID NO: 78206 - DNA, 401 bp, Oryza sativa
tatcttgtgatacaattgaagatcccgcagcgttcccaacaccagacggagatggtgctgatggtcttcctctgattgtgagtatatcaaaatgtcatcaatgaaaaccacaacatacttatccaagtattccatgaacactttgttcattaagttcatgaacaaggcaggtgcattggttataccgaatgacatcaccgggaattcatacagtccgtatcgcgtggagaatgctgtcttcggaatatcttcttcaccaatacgtaattggcgatattcggaacgaagatcaatctttgagaatacagcggcacctttaagctgatcgaacagatcattaatccggggaagagggtacttgtatttgatggtgacttctttgagagctctgtagtcaacgc

SEQ ID NO: 78207 - DNA, 56 bp, Oryza sativa
aaaacaacgcccattaacccaattcaacttttttggcatgtcgccgatggagtaaa

SEQ ID NO: 78208 - DNA, 279 bp, Oryza sativa
  unsure (1)..(279): unsure at all n locations
gcacgctgcggtcggacatgcccggagcctcacctccgtatatattccgaaaaggccatggcttggctgctangctcgtgcccgtcgcattaacgcgtgtgcgagcgcgccgagcggctcgtgcggtgaatttaccttcctccatctgcggcaggacaacgccgtggatggtccgcgggtctgtaccacccacaagcataatacgtagatgcatcataggtactgtggtgccaccgcggccgccaccaccacgtatcctgagcggtccacgcaaacacg

SEQ ID NO: 78209 - DNA, 407 bp, Oryza sativa
  unsure (1)..(407): unsure at all n locations
agcttattaaataatttatggggtagccttacattctggtaggccggagtgtatgagttcntataattcagaggagcttcctatttaccccgaagtggtagtttatgcgactaagcgtgtccaatacaaccgtattgtgccacgtggtgggttcctgttgtgtccgccaccacggcgttaagtttaaagcgtgggcccgccacttaacggttctaggtcatataacgcgtatggcttaagatggagtaacacgtatcgtgctcggtgtagggtaaatcatgaattttggagaagctttgttgccggtaataaatcgggtactcatgtatcgcgtgccatgctcgtgcatgattattatttctcatcatgtgggtaaagtgtacagactctgcagagataatactaat

SEQ ID NO: 78210 - DNA, 445 bp, Oryza sativa
  unsure (1)..(445): unsure at all n locations
tgacactgacactggctcanatttctcacaaggcctggtcaaactgtggtgcccgatcgagcaggtgatcgtaggacaccccggatctttcttcttcttcgggagctngtgaagtattacgttgctgcattgttccgttagcttgaccatctttgttgttgggagcagnctcttgttggtgagtatgtcctttagataacgggcgtacgttggcactcgcatggcgttcaacaacggcacgtngatgtggatcttctggattacttcaacaaaacgagcgaattgctcgtccacaaatgggttcctactccgttgagggaacggcagcaaccgtgtgtcgcaatactcttgtggcactgtctnttcttgctgaacttccttgtcagccgagtcattagatgatgcttantttgatatcccaataactcctgcangggtaggatat

SEQ ID NO: 78211 - DNA, 428 bp, Oryza sativa
tagctttggatgtgcatcgactacaccgaccttaacaaggcatgttctaaggattcttaccccctgcctcacatagatcagattgtcgactccactgcggggtgcgaccttttgtgttttctagatgcatactctggttaccatcagattcgcatggctagggaggatgaggaaaaaactgcgttcattacccccatatgaacctattgttatacgacaatgcccttctggttaaagaatgcacgtcctacttttcaacgtactactcgaatttctttgggtaaccaattaagacgtaatgttgaggcttatgtcgatgacttggttgtaaagacgcgcaaccaggaaatgttactctcagatctagcggagacttttgagagtctccgctccgcccgcataaaactaaaccccgataagtgtgtgtt

SEQ ID NO: 78212 - DNA, 336 bp, Oryza sativa
ccttggcaaaagtgcacccatcacccatggcaattcaacctgctgtcagatagacttgtcacccaatggctctataatactcctattaaccttcctgaacagctcaactgaaaaatatggactcacaaacacctcaatgtttacatccctatcttgttgagagggtatcaaagccaatgcatgctgacagggctttccagtgtgctgtcactcctcacatgagcagtactgattggtagccttcacaacatgtttctcatgggtggcgctgttgtctacaatctctgctacaatactatcataatttactactcgaaagagacccaaacccctatt

SEQ ID NO: 78213 - DNA, 545 bp, Oryza sativa
  unsure (1)..(545): unsure at all n locations
ctattaaactaagctntagtccctctggttcttatactgcaatgaagcatctggaattagtttgcacattcgctaaaacctgactttagactcgcataagtttttntattagctaaccaacaatcaaggaataggctntagaataaataggagtttcaggaactagaaattatctggatcttaatataagaccccccagaaattcctcaggcctataccagcttcctattagtgggctagtcaagtataaatgtgtaatcgaaccttatattcctatgttaagataaagttacagaagatttcatcaacttaagagatagatagaagttcctttcctagacaagagagatgattattgaagttctgtcatacaaaaagtttagaacctatagatatgtcgacattgtgaatatattctcttgttaaaacatatggaacacagattatatggttagtttctgcaacacccttgttgtatgattcacatttatattgacgtgtgtattgtgtagcggtcatacttttattgtatcaacatttcatct

SEQ ID NO: 78214 - DNA, 440 bp, Oryza sativa
  unsure (1)..(440): unsure at all n locations
agcttgctgtgaaatgttcagacatgtggtctgtcttaccacttgttcaagctctgcttccaggtattaagtggaacatatatacacttgtgctttatattttttactttttgatccaaatggccaaaaaaaatgtgaatagatagaacatttgttaccaaataatgtacatattcccccatgctcattcatatcttatcctatatataccaagtgatgacaggcctctgccaactggtgtaacataatgacacctttngttttgtgaattttctgggatttatcctttggcctctncgttggcatgggcctaaggctttgggatgattgtaattaactggcctaacttacccattcgttgagttagagaaagggaattccttgagttgcataagcgtacaacacagatggctttgtngactggtgcactgatagtatgc

SEQ ID NO: 78215 - DNA, 156 bp, Oryza sativa
  unsure (1)..(156): unsure at all n locations
tatactttntatagcgaaggaagttccagaatggtactaaattatgtatgggcatcagtttctcacaaattaataaaaaatggttgggccccttttcccctcgtttaccatttcttcacacttctttattctttctctgttcgtcttcttcttatt

SEQ ID NO: 78216 - DNA, 324 bp, Oryza sativa
  unsure (1)..(324): unsure at all n locations
agcttgttatgcaaggcaaagtatttggcatatataaaaagataaatagattcatttgagtacaaacaaagtattctaattattccttcattagaattacatgtgcaaattntgtaaaacaacatgtttgccgaaagcttgagtttcaatatattcaaagggagggagggtacttgccttgattatgatccttaatcgggttaactatttactcaacctccttattgatgacatccactagtacagaaactccctatatgtgtcggttgaaaccggcaaaatgtgcagtttctctgtcggcacaattggttggaccaatacact

SEQ ID NO: 78217 - DNA, 340 bp, Oryza sativa
cttgagagctatctctcgtcattactggagggtaagcaacatccccgagcggatttatcgaaagggaagcatgttattcagtatggacagcagcagaaaataaacctcctaaaaggaccaatatcagctccctgtcgctgggataagccacctcagggatggatgaaactcaatgtggatgggtcctttgttcctaacactgggaaagggggcattggcgcgatactaacgaatagtctgggagaggtaatcttctctgcctgtgggtaccttgtgcgatgcaatggcccttctgtagcagaactactggcatgtaaagagggcctcaacatgggccttc

SEQ ID NO: 78218 - DNA, 325 bp, Oryza sativa
caccccacaacttcatagactgcgaccaacagtcaagctcacaaaggtgagttcctttaagaatgctctgcaggacaacatctttgctaattaaagcccacagaactcattaaggcatagccaacctgccttgcagcttacgagagtatatgcatcttcacttggatagggtatatatattgggactctcctctagattattaacggtttggtctttccagaatctaattcaccggatcttcgatcacattgactgtgttaccaccatagtataactcacatgggtctcaaacccatcttcttcgaagcatttgctatcacattt

SEQ ID NO: 78219 - DNA, 400 bp, Oryza sativa
  unsure (1)..(400): unsure at all n locations
ctgcacaattgtagtttctgaccaacaattggttattatgggctctttcatcatttggcttcctaaacagcaacataacctgtgcaacacatggttatcaatatacaacaacatgaaaaaatatcatctgcagaataatttcatttggagatcatatactaaaaaggctggtatttcagaatcgaaatgaagaggtgaatttcacagaagctagaagcctcaccgctgcggtggttggcacaatgagaggtgcctagctcctccgactcgtactcgtcgagcatacacangctccngtccggcttctcgatgagctccagacgcggactcgtcgtaccactgcaggctcctcctcttgcctccttacgcttcttctccgcttcttccactctactcttct

SEQ ID NO: 78220 - DNA, 436 bp, Oryza sativa
tgcttctgagatttcttcctacagcttggtgagcctcctggacctcttatgaaacacatgcttggatgcatctatcaaaatcaaagcccctatgcaacatgcagtaacagctcatgtatacctttcgctcaccctcactatcgaggctactccgatgtcttctagccaacaaaactagaggaatggaatcgtgagagcattctcttcattgtatactttgacctcattccccatcgagccaccaatcgtccgcgacgagctctccaaagccatggcctagctcccaatccatcgggctgctggaggttgaaaatgaagactatgtcctgttaatgatcaacaatataggggtcaaactataaaacttaagtcgttacatgtggacacacggacctaaatgcgtttcatattaagcccagcgacctttttgtatatt

SEQ ID NO: 78221 - DNA, 445 bp, Oryza sativa
agcttgaagaagatggatcgccggctcgtgtcgatgtaggtggctccacttgtgctgaggaagaggccccctgttgtggctccctatgacgtacgtccccaagagccaacctcttgattgctacgctcgggtcctcctcttcacctaacacatgtgagtcaacttgctctacttgagagccgcttgtttcgtcatatgtcacatcacgcgcgatcccaacaataccagaggttttattgtaaacgcggtatgcacattcatttgacccatacccaagcaagaacccctcattcactttatgagcgaactttgatgatctagccttcttagtaagaatgtagcacttactaccgcaaacaccaaagtaagagacatttggtttgtgaccgataagaagctcatatggagtcttctttagaaagcggtgaagatacaagcggttgat

SEQ ID NO: 78222 - DNA, 509 bp, Oryza sativa
  unsure (1)..(509): unsure at all n locations
gctgttattacgttgtggtttagatgaatgcgaagaagctaaatatttgatgttnttatgtgggcttaacaaagaaattcatgacatgcttgattgtcaaagatatacatctctttctcttttgttacaacttgcttgcaatgctgaaagtaaaatagaaaaggatatgaaaaagaaacacgctatgtctttgcctccaattactaactatttgcaggaagtgcgtaatcacgaaaaggaggagagagacatgatagagccaccaattccattgntcacactcaagttcgagacacctccatcatctaaagaggacatccaaggtaaagtaaatggtacttgaaataatcaaggtgagtgcattgttaacgaagtaaatntgtccacttttcatgcaaaagtagagcaaccgttagtggaaccaaatgctggaattcctttgtcacaagttgatttactcgctgttccttgtgataaagacgagntgtgtgataatgcttcacttatat

SEQ ID NO: 78223 - DNA, 320 bp, Oryza sativa
tgcgttctaacattctactgtgaggcgggagagaaagaaataagcatctacatacgatagaaaatgatgaagccaaaaaatgtgtagctagtaccggtgggaaaaaaacaacgggctaaagtaggattttgtgtaatataaacaataatattacataatatacgaaagtatacgcctgtaaactagatatataatataaatatcaaatatccaatcaacggtctctaaacattatatgttaaattatttttaattatatgcacaatttatgatccattgtattcgcttaattatataaaagattggtgtataaaagtaat

SEQ ID NO: 78224 - DNA, 427 bp, Oryza sativa
  unsure (1)..(427): unsure at all n locations
tagtggagcttcgctgctgtgcccggatntttagaagaacatgttgatgaggccatcggagagggccaaccctagtgaagtcatagtattcctcgacatctgacgaagaagagcagtgggaagctggttcgaggagtaggcggagataggcctgcgaggggaaggaagctaggcagccatgcgctggctctggctcgcctcgagctcacagtgttggcaaaggagacgacatcatcggttggtggtctccgagcaaggcgaggtggcatacgagaggaggggccgccatcgcttgtctcctctgcatcaccgcccatcaccgccagagctaggcccgaaggtagatccaactcagcggattatcccaacaatgatggccttggatatcgcaacgacggtggcggngacctcgggagaggcgacgagc

SEQ ID NO: 78225 - DNA, 457 bp, Oryza sativa
tgagaagattatattatctcatcactgcataaagggcgcatgtgttcgtttataaagacaagtatgcgtgtatgtgtatatgagtgtgtctaaaaatcataattcatacacaaataaactattaacaagaaggcgttagcttacaaatacacactttatttatatcctaactggtctaaagaccaaattgtttccaaagccttacctagctcttcctcgcacaaagattaaggaaaaaaatgcacggggttggccttgtctcttcggttattctttatactttgatacatggggcctgctgcacatgtttttctcttgctttggaagccacatctctatgttcaaccagcacagcagatttctcacacccacggtgttgccccatctaataataatcatcgtggcaatcacgaaagtaatcagattgattgtcgtacgaacatgctaaatatatatc

SEQ ID NO: 78226 - DNA, 496 bp, Oryza sativa
taagaatctcaattcactttctgttctgtttctattcgcatgctaagccatctatcctgtaataattaattaatggcagcattccggctaacggttacaccaactgtatataacaaacagtcatccatattgatgggacccacatatatatactataactaatgttatcttcacaatgtatatggatagcaactattattatgacgagagagaatatagagacatataatatattttaattctatatgggcagcccatatgctcatgggtggcttttgctatattcttgctatggactatttacacaatgtggataagtggctgaatggaatatattattgcttattgactaatatcatgcagcgctcgagagggtgagagagtgaatttcgttgtttcgttttccgcgcgcacgttatccaaactactaaacggtacgttagttgcataatttcttataagaaagatgcttaaaaaatatattactccattttaa

SEQ ID NO: 78227 - DNA, 442 bp, Oryza sativa
agctcggacccgggatccttagagtcaactgcggcatcaagcttgttgtttttgagagtcttgcatttgtgtaacccccgactttttggttagttgggaaacaactgaacatatagtcgagaatagtagcttcgtgtcgtctagtagtcattgcttgagtgaagataagcgtcgaggatgtccgagtaggaatattgaatattggaacaccacttgctgtagtaaaataacatggcatcatatttggtgacgtatgccgagttgtcaaaactcttgtagtcgtcatggatggtgaagaaccaaagcttgtgaagtacaggcaatagagtttgccaatgccaatgatgataaagatgaagtcgctctaccatggtgacacaattgcatatcctcgatgaggtgaacacgagtcagtgggaacagatagcaaccggtggtgaag

SEQ ID NO: 78228 - DNA, 447 bp, Oryza sativa
  unsure (1)..(447): unsure at all n locations
actctatcatcttcgagagttatacacgagtaacgtgggatacagactgcttaatgaacatatccagcagtatacagaccgactattgtgccacttgatccctcagaatttaagcctactagcaattaacaaaagataatcgtttctctctggccaatgcagtgaacccccagttgattcattttgttnaaccatgacgtgggggaaacaaacaaatatatatactactagtttatatgccatagttacatcctacttaagcgagatctctcttcgatcaaccncaanctataatatccacgtgtttcattagcatgctctataaattgttagatggtgaaatttttgcacacaaattatacaaaagttctttataaatatataaacccattgtaaaatttgaattataatattcattattaagtgtaatggctaactcttggcatg

SEQ ID NO: 78229 - DNA, 406 bp, Oryza sativa
agctctggccatgtatacattggaaatttaattattgatcagaatctagtgccagttgcaatcaaggttcttaatcttatccaacgaggagccagtagaagctttttgaccgagtgtgacgctcttatgagaattcgacaccggaaacttgtcaaggtgatcaccgtctgtagtggatcagaccaaaatggcgacgaattcaaggcacttgtcctagaatttatttgcaatggaactttatatgagtggcttcatgcaaacacgacagcagttagaagaagctacacaacgataaatctgatgaaaaggctgcatattgctcttgatgttgcagatgcattgtaatatcttcaccatcatattgtgccgcctatagttcactgtgatattataccaagcaacattc

SEQ ID NO: 78230 - DNA, 457 bp, Oryza sativa
ctcaagctcggagatgttcatctaaatatcggattttgatcaaattatgctagtaatttgtatttgcttttcttttcagatctgattaagtttgcagtaactagcacaggttcgggtgctgacaattgagctgtttgtggctgattaacattgggccctgtaggcccagtactagttcttctcttgaatcaccagaaccacagaattcagatcgaatcctgccaaagtgatggtcgttgtaagctgtgatgcatgaataataaataataatccagtccatttttttagggtacattgaccacaagtagctctctacaggttattaatgaaaactatgtatatatgtttgactatacattgagagaaaatgactgctacatggcatatgccgaagaagaaagttatatagaagataataagaaaattaaagggaatatgtgtgtgtgagagagaattc

SEQ ID NO: 78231 - DNA, 447 bp, Oryza sativa
tcactcgtcccgggatcttaagtcacctgcggcatgctatctttacatcatataaaaaagagagaacatatttaactgaattggtactgctagggtaaaatgtagtcgagtttgcaactttatatgaagcatactatctctatgtaacatagagattgtaaattaaacttcaaatgatgaatagtcacctaattggtttgaattcccaaacttttgctagatatgctcaatcagatctgattgaagttgtttttacatagtatgatcacgagtagtggcatccaattacgctcacatcctgatgttgagcaacaaaggctaacaatatgctttgctaaagtttggagctcataagcaaggcctccataagctgaccaccaaagaacagcaagaaaaggcaagttgatacacttacacctagccagattgaaacacaaaacaaacaaa

SEQ ID NO: 78232 - DNA, 499 bp, Oryza sativa
  unsure (1)..(499): unsure at all n locations
gcttcttcttgaacactcacttgcacaccacaggtttacactcatattgttgctctgtcacctcccaagtcccgttagcgataatggaatccatttcactatggacagcctccttccagtagtctgcatcaggagatacataagctcttgaaattgacttaggagtgtcatccacaaggtacacagtgaaattatcaccaaaggacttagcccgcctttgtctcttactccttcgaggagcttcactgacatcctccttagtgacatgttcatgtgtatgttcacgttgttctggtggtgtgattgaactgggaattatttcagagggttggctcgaactactgtgtgtatcctacattgggagaaagcacttaaagaaggtagcatcacgagacttcataattgtaccaacatgcatgtcangtacctcagaattaactattaaaaatctatatgcaatgctgtgatgagcatatcccagaaagacacagtccatagt

SEQ ID NO: 78233 - DNA, 442 bp, Oryza sativa
  unsure (1)..(442): unsure at all n locations
tatcttattttgtggctcagtctggttataaacaaaagtacacggatggagatggacgaagtccggggtcgatggacatctctagggcaaatgaaggctacacgagctgcggcccggtagtcgagatgtcagggcacacggccggtgtcctgctgctaggggctcaatcctgcctacctgtcccgggggttcccgccgtaagtggggttgggtcggtactcttgtttatggctaggatgggttgggaattatgtcacgtcttccgtccgtataccgcggtggtatgtggcacgtggttacatgtcacgcccggaaattcactattaattttccaacttatttgtgcataaaatcctcttccaggaattagccgaggtacacaaactgacaatttaatatacagattcattcaattaactaanacgactaatacttacttatg

SEQ ID NO: 78234 - DNA, 450 bp, Oryza sativa
  unsure (1)..(450): unsure at all n locations
ctatgtcgatgatgtagtcgtcaagaccaagcagaaggatgacctgtttgctgatttagaagaaacctttgcaagcatccgcgctttcaggatgaaactaaaccctgaaaagtgcatcttcgaagtaccgtcagggaagctgcttggattcatggtgtctcatagaggcatacaggccaacccggagaaaatcaacgccattctcaacatgaaaccaccgagctcccagaaagatgtccaaaagctgactggttgcatgcggggctcantcggttcattcatgactcggagagcgggggatgccctttnttaagctgttaaaaaaagccgacaatatctagtgnggacccgaagcacaaaaagcctntgaagacttcaagaaacttctcactactctatcnagtttggcctcaccgcatccacaagaagccgatgttgtgacgtgtcggt

SEQ ID NO: 78235 - DNA, 387 bp, Oryza sativa
  unsure (1)..(387): unsure at all n locations
tagctttatgatatagtggggtatatcagtatagaggatatagataagaagaacgaattgtttcattaaatctcattcttactagaagaaattatcatttttgaaacggcatatgagagaaaatcatctattcccaaccagagtaaagagtcacacatgcaagtaccataaaacatagaattaacgagggcattcggtgccaattctcggatttccatcaaagttggctgcaatcctgccggcgtcggcgaacacgggcacacaccgcacaggtcgttgtagaggcatcgaatacgcgcaagttgacaagcctggtgcgtctggcactcggccggtgaaggcgttgtgatccangcgagcctccactatgctctccatgttcgggat

SEQ ID NO: 78236 - DNA, 449 bp, Oryza sativa
  unsure (1)..(449): unsure at all n locations
tgttcacattctatcttggaactgcatgcatngaattaattaatatattatgatcataaatatcacgagctgtctagtacatagatagagacttacatcctccgcgttagtcctataccgtccattaaccctaaggaaatcgcacgcataatacccgcaaaggaccgttcctcgcggatgcttgtgacacttcaggacatttcatataaaaaagtagtaaaatctggaattagcgaaacacttgggatacataaagtgggtggagttttaccggccaatatgtaccgacaatcaacattctcccgtgttcgggtctgttctccacccttgaacttgtagtattggtatgcactgtatggatgtcgtaccatttcagagtacggaggatatttatgtgtaatacattcatataccaatgcaagagtcataataacttactacttgaagat

SEQ ID NO: 78237 - DNA, 433 bp, Oryza sativa
agcttcttacatatcggttgatcaagcctataaatagaaagccagtgcatgtgtatagactgatgatggtgtgctgcccaacgtacaagcaagtgtactggtcagccctcatgcaagcaagtaaagaaaccagttaaaactagcacaagcttctctgctcctcttctctgatcccctgcttaggaaatatttagcaccaacacctgattcagttgcctcttcgtcatgacatattatcatctaataataataaaatatctaaagctcgtccttcttcgcagcggaagaatcatccttgctgctctttggcttctcatcagcagagaccttgatgtcctgcgggttctcatcaccctcgtccttggtctgctcagcaacgacatcagccttgtcatacgtcgcctcatcctcatcattctgacatatcaaatat

SEQ ID NO: 78238 - DNA, 401 bp, Oryza sativa
tagcttgtccatagggccacagactgtggacagccacgacgtggtcaggcccacgtctcacgggtggaggaggaatagacagctctgctcctggctcatgcaagcatagagctacctgcagcggcaccggccgcagaggcttttctccaccttgatgagccgaaggtactcggatccctctgcaacggctccagcaactacaaagctgatgggtggtacctcgacaccggcgccacccatcacatgaacggctgacgggagttcttcaccgagttcgactccagcgtgcaaggcttcgccaagatcagagacgcctcccgcgtggagatcaatggtgttggattcgtcacctttactgtcaagtaccgagagcacaggctgcttaccggagtctactacat

SEQ ID NO: 78239 - DNA, 457 bp, Oryza sativa
  unsure (1)..(457): unsure at all n locations
caccacttgtcaaggaccagaagcgtgaacgcggcaaggggaaggtcggcgagttggcgccggagccaaaaaggggcaaggctgcgacgtctatgccagtgagcaaatcggggaaggtcgtgagggcgccagcccaatttgagctaggcatgccattggtggaggacaatgtgttagctgtgatgggtattgcttgccgagagctacataagcaatacatggagctaagcaatgccaagcggaaaatgagggagtcatccatagttggacatcacgaccaccagccgttcctatcgtcgcctgcctatataactataggctntgatgacctcttcgaccttttcaggatccggaagttggacactggtcttctaaaatgctactccttgtaagtgcataccttctatacttgtgatatgactggactatatctcctaaataaatagttctaatacgt

SEQ ID NO: 78240 - DNA, 387 bp, Oryza sativa
tagcttgcgacgtcattaatcgatgagtacgccctgctgggctggcgcgccatgctgactgaagtcaatctgtcaccgaaaccacgcctcgtggatcgcattaactgcggtgcgcacaaagatatggcgctggaagatttccaccgcagcgcgctggcgattcaaggctggctaccccgtttcattgaatttggtgcctgtagtgcggaaatggcaccagaagcggtactccacggattacgcccaattggtatggcttgcgaaggtgatatgttccgcgccactgcgggcgtaaacacgcataaaggcagcattttttctttatggctgctatgtgcggcaattgtgcgtttgcttcaactcaaccaaccggtaacgccaacaacc

SEQ ID NO: 78241 - DNA, 400 bp, Oryza sativa
agcttataaatgggctcgagctcggctcgctcgagcctcgagctttctcgagcctaactcgtgtgccctcaaataaccaatacagatgaaaggaggctgcatgcatgcttgtcgagtactactagtactagtagctctttcaaacatgatatgacaactagtagtactattaaatagagctgcatgtatgctagtagtactaataggctagtgctgcagagtaaagtagtactagtaggctagtgcctgcacggtgcagccctgcacgctctgtgtttctatacagcttttcattgggagtaggagtagtactagctgttgcatttgaaaattaagagagggaaatctgggctcgacgagctattcgagctctgctcgtcaagctcgcaagcttggagct

SEQ ID NO: 78242 - DNA, 454 bp, Oryza sativa
  unsure (1)..(454): unsure at all n locations
ctaagcttaactctccttgtcacatgatgttcatgtcttgatgaccatcaacacatggtgtcatccattagtctcatcacgacaatacataactcanaggaaaacattagtcctgacaaatcagttgtatccttccatagatgactaatcgggtgcatatgaaatatatgaatacaatagttgagtactcatcaagaccacaagtgccaaatacttgcatgtaagcttaagtgcagagatccaatataaactagataataccccgcacgtngcagccggacatagtgcataccaacgaaagagggaaaattcaatgagaacatttgatccatcacaatacatgtaacanaattctatgagaatatttgatctatcacatttaacatataagtgagattgcgttcttgcccctctctttangggttttgattntatctcatttgatcaactatag

SEQ ID NO: 78243 - DNA, 500 bp, Oryza sativa
  unsure (1)..(500): unsure at all n locations
ctaagctgttactagcacccgtcgccgttattattggcgaaatcttgtttataatcatgatcgctnggctaagtatcaacggaaagggggcttgacgttgcgacatttctgtgccttcgtcatcctgcacaagttgcacactacatatgttctctattgagtgcccagtcctaaacttttttaacaactaatacatgctactagaggtctcttcaatcatgtcgttagctaattaagtagtaccgagttgttgtctgatttcttgcatcagaaaagagtactccctctaccctataataaaagaatgatgagtgttgtttcttacactctntaaccactcgtcttattaaaagagagtttatgcaaatatataaaacgaaaaattatgcttaacatactttaaataataaagtatgtaagaaaataaacaataatgttaaattgttttaataagacgaatggtcaaacaagtgaagagatacgtcaaactcttatattat

SEQ ID NO: 78244 - DNA, 449 bp, Oryza sativa
  unsure (1)..(449): unsure at all n locations
agcttaattacttctatttccatgtcttgttatatcgtaaaatctaaatggactccaaaattaatcattaaagtatatatatacaacaaaaatatatttgcagacaattaatgtttatatatagggatgattcaccttttgaatggtctatgcacaaagaaaataaacggaattacccgaaatgcttataaggccagaacaacacgcttgaacatatatcaataatatactaaaagtgcattaagcaccatctaaagtcaattagatggtaacatagtttagagaagatacacgaaagatcatttagcttgcttggattattttagcacattttataaaaaatcatgaagtaatcagatattctgtaactaaagccattggattttcgatgcattggtggtttggacttcatattntagttagtcctatttgcttagatagngatatct

SEQ ID NO: 78245 - DNA, 331 bp, Oryza sativa
gagctatacttctggtgaagtatcctatgtgtttccactacttcaagaaactattctggatgtacttggagagccagagttcacaaagatactgttaaagtctagctaacgcactacattccatgaaatcccattgactgattgcgttttcaatttgatatccattgagtgaatgctaatttgatgaattactgtgccttgcacgtctgtgtttgagggtactattaaagacatgaaaatgccttgagatatattataggtgactgaaatcatgctgatgaatatagctcacttgctcttgtgttcttttcttccgaggatgatgctgctc

SEQ ID NO: 78246 - DNA, 368 bp, Oryza sativa
tctaagttacctgcagctgcagctcgtagctcttcttgtgggcctatgttattgggggtgcgtcggctggctactttcaatactaccatttacctttcctttggaaaccacatgactctgttacattttttcttaacgcccaaaagagatctttgtcatacaagcatttgaccattctaccactaatgtttgctcccaatggcaactttcttttttcaattctctaatcagaaaggactcctacccatcccgtttatgaatgccccgattgataagtctacccgctatcctgatatttttaaacacttgtcaccaaatctatacgtatacccttgacacttaaaatattatgtttgagttaaaaatta

SEQ ID NO: 78247 - DNA, 367 bp, Oryza sativa
  unsure (1)..(367): unsure at all n locations
ctcagctgctagttcatctcgtcagcaccgaatcaacattaaatgttgttagaatctgcangaatgcctgtgcttccaatgagtagccatcaaaagcatctaggtcaacctcagctagcttactcttccactcttctgcaatcgccttggccagctccctaatttcagagctccaagggtggttgtcacctggctccttcgtagctagtgcaggtgttatagcttccatcaaaataatgcagcttctacgctggccctgtagaataatctgtttattcccaggtgaactagtatggtcagatgggaagaaaccctccaaggaacctagcacatagcgtgcagggtcagtatcacatcctaatgcagc

SEQ ID NO: 78248 - DNA, 428 bp, Oryza sativa
  unsure (1)..(428): unsure at all n locations
agcttcacctctggagattttcgctgagggtgtcaattttgtggatttatatacttcggtctgatgccttgattcaactccctgtactgccaatcttgcagtcagatttctgtgtcccctgtatctgaagcttatgatggcctgtttggtacagctccaactcctaaatttaactccacgagttgagtctggagtggagtagtggagatgcataaacctagctctacaactctagttcattttgtgagagagctctacccagctccacttccagttttggtggagctgaaactatatggctgagctccagctccaggaggggtggagctggagctctgcctaacaagccctgagcatcgaanaacctgcacatatgatactcctgcgctactgtacatgttgcacggttggcaattaatgcgaggtgc

SEQ ID NO: 78249 - DNA, 369 bp, Oryza sativa
  unsure (1)..(369): unsure at all n locations
ctcaagcttgtcctcatcggcgcctcttcccggtacgctcgcttncactgatgtgaattctttctcgctcttaannatgaatctgatcnggggcgatcggggagcacggacatgtgtgtgcaggttcttgaacgacagcgactaccacggcgggttctagctggaggagatacagcangtgttcgacgcgatgggggcgaactactcggcgtgggcgactgtgtacgcgcctctggcggtgggcgccgacgtgccagccgcggtgcatgatgtcagccgcaccctcttcaacatgcgcccggacatcttcctccacgtctgccagaccgtcttcaagaccgacctccgcggcgtgctcggcatggtccg

SEQ ID NO: 78250 - DNA, 290 bp, Oryza sativa
tcgcgagaactacctctgcccgaaccgaataacaacgtgaaggctcgcccgattctacaaggcatggcaaaaaactaagacctccaacaagcatttgcatcaatcaaataaacatgtatattttgtcgactaagcaatatgctcacatcagatggcatacgatgcgaactgtctttagctggcgaggcatcttgatgctgcgtaaacctcgggagaggacgaccaagacccgactctgggtttgaaggccacgcaagcatctcctcgatgaatagctctctcagttgccc

SEQ ID NO: 78251 - DNA, 479 bp, Oryza sativa
  unsure (1)..(479): unsure at all n locations
gagccttaaacccatagaagctattagaaactttcagttctcgcaaactaagtagaanaaccaaacagggctatgattaaccaagtaagcatactgaattgataaaaaatcatactccattattatgatgatagcccccgactgacaacggcaagaagaaaacttgatgttgacagtcaaaatagggaaatacaatgatgaagttaagcgtagaaacgacgaagatgttcaatgttccaagagttgtcaacgagagtgccgcttcgcgctgagtcatatgaacctgccgggaacttagagatatgaatggccttccataaggagatacttggccgactcggtggctggatttcgtaaaccggtcgcgactaaaagcacaatcaacattgcgatatatacgtgcacccttgaagtaccactgatgaataagctgttccggcttttcatcgtgcagtatcactcgcctttctacgtttacg

SEQ ID NO: 78252 - DNA, 444 bp, Oryza sativa
  unsure (1)..(444): unsure at all n locations
tatcttataataaagttatgaatagctaagaaaggtgaatcacaggtgaaacacanattgcacacaaggggagacacgagagttttttcttccaaaattcggattacaagaatcctattctccgctgaggcacccttgggttgggtagctaaaggagggaattttcttgcctcgactttcgacaagtttatcttccatcgatccagacctataaaacattgatagttgttataaagaaatagacaatggaaaatgaaatgtaaaatgcaacgtatcatgttaatatatacttccttggcagggtcaaaatcaatgtcgttctccccatatcaaggtggctgcgggcatgggacatggctcggcnaagtgtactcaattgggtatacccccactctcatcngatgatgatatcataggtcttatggttctttcctgcagttgagt

SEQ ID NO: 78253 - DNA, 296 bp, Oryza sativa
atgcgcttaggcacggccatacataacatataaatcacacgtggaaggggtgggcaattagctagagcagcacgtgctgtaccgaaactgattgcaaaagaatgtgaatcggccactttaagattaccatctggggaggtcctgatggtatcccaaaactgcttagcaacagtcggacaagcgggttatgttggagtgaacacaaaaaagtttgggtagagccgggtctaagttgtgactacagtaactcctccgactaagaggcgtatttatgaaccctgtggaccaccctcatg

SEQ ID NO: 78254 - DNA, 434 bp, Oryza sativa
atagacgacctgtatgctttctagcttttgctggctagaaccattcagagcatggcaggccatagaatggcttcattgggtcttcaagagaagccaaacatcatgggggcttgtcctccggaatgggaacactccaccatatgaatatggctgctctatgcaagcaccttgctggtttattgccagatgcggatgctactccattggccaccatcagctcaccttctttatttgaaagactgtctgatccaatctccggcatgctcaaatggtactgaagagacccttctaacatgttcttccgcacctgtgcaaagctaccagtatactgtgcaagtcgcaacaccgcagagcaccaccaacatccccaatatattaagacctacatttctatcatgctgaactctttatttctctggtaagctgacttattt

SEQ ID NO: 78255 - DNA, 407 bp, Oryza sativa
  unsure (1)..(407): unsure at all n locations
gagaacatggacaagatccattcgagcattcgcaagaattccagagaagataaacagtactacctcatgccgtgcagtngacagtgaaaaaataaaaaatatatctacgtagatgatcagccccaaggccaagaccaagagaggtcggtgagaccttgtgaccaaacgagagagaaataatggttttggaaacggggtagaaacttggacatgttacagttaaatgaaaacaacttctgaaaataaatctcgcaagagaaacaacttctgaaataatcccggagaagagcactgtcccggacatcatgattgtcgcacaaagcgggataacggtcatcgatattatcttgtgctcagtgtacagtatagctgtctatctattatcaataaaccattaactttatttg

SEQ ID NO: 78256 - DNA, 398 bp, Oryza sativa
  unsure (1)..(398): unsure at all n locations
ttgttgcaagcttttgcagctncatctccgagcggaagagagtgccaagtatactggtacaccggaggaagacaagaatactttggaagagcaagctcatgattctgaacataaaaccacttcgcatgctcaccctttgtttgaggtcttgaaaggcatagagaagtacttctgactcatagttcccctcaactgaaaacctgcccctccgactacacatggcttattcttgttcggttggggcttgagaaagaagatccggcaatacatagcgaagtggggcctaattcctcagaaaggcttacaaacatggatgaaatttgcgatatggactatggaatttcggtttatgtgatgcaagctgattccatagaagcttaatatcccgcggagataat

SEQ ID NO: 78257 - DNA, 395 bp, Oryza sativa
tctagagaaaaattcccacaacttcatggtatcatagctcatctgttggcggctggcgacaggcgacagctaaaccctagcctcgccggagcttgtcgaggcgtgcatagaggtgctgatggagctgcgctggcagagctgcgcgtgtacgcggcgcacgagcgcgtggagctccatgtgaggagggaaacgctggtgctggagctcccggcgaggacgcaacggcgtcaacggtggcatgcagagtcaactggtggccgctcgcggagggagctgctggttgtgaggaccgcactgctggtgctggtgtgaggatttggtgagctgctattgctgttctgttgctgaggcagagaagatcgagctgaggatttggtagtgtgctgttgctgctg

SEQ ID NO: 78258 - DNA, 395 bp, Oryza sativa
agcttttgattgtttcctcaaattcaaatctttagttgcatatatacaagttgctctggtgaaactaaccggcgggtgaaactcttgtcatttctaacccctgccgagttagtccgttcttgcttcattgtgcagaatgaggaggcgattgtctcgtctgttcaaagggtccggctcttcgtcaagtcatcatgacgagtctagtactcgttcattatccgatgtctcgatgaaagacgccgaagcttcgcgacgactcctaaacgacactgacctcgaccttgtcagtgatcgggagaggcaagcctactacatgctgagcgaccaggagtatgctcacacacgagaatactcaccggagctgctgaaaaagataaggatggatgttgaatttc

SEQ ID NO: 78259 - DNA, 372 bp, Oryza sativa
  unsure (1)..(372): unsure at all n locations
ctttacttaattgatcagctgggtatagatcccataaaggagaaatgactaattgatcgaataattcattagttacttaatacctggccagcgtcttctggaaatatgctgttcctttctccttgcacctataaaattaaacagcaattaaagggaatcaaacagctagcttttgtatcgaccagcatatatatactcaattggttcgttaggcataaagtgtctgtcaatacttttatcgaaagatctcacagagatacgatgctctgaataaaatcataagcacaagctttttattcttgattatagtgtgcanagcttgatctgccattacgtaacctaatctaaactaatctagctaacccatgcata

SEQ ID NO: 78260 - DNA, 387 bp, Oryza sativa
agcttgtaatattctgctaggtagaccatggcaatttgatagggattctatgcatcatggtaggtcaaaccagtactcttttctgtaccatgataagaaaattgtgttgcatcccatgtctcctgaagatattttgcgtgatgatgttgctaaggctgccaaatccaaatgtgagagtgataaaaaagcccaatctgatggcaagaaacctgagacaatctatttgaaacccagatgcttacttgctactaaatctgatattaatgagttgattgcatcaccttcagttgcctatgtcttggtatgcaaagatgctttgatttcacttcacgatatgcagcattctttgtcccctgctggtgctaacattatgcatgagtactctga

SEQ ID NO: 78261 - DNA, 350 bp, Oryza sativa
  unsure (1)..(350): unsure at all n locations
gatgctgagttctcatacacaacagttaccaagccagtcttatttggtaccgtttgaagcactgtattgatggaggtgtcgcactccgctcttctgggatcagacaggggaacaccacttgtttggtacagaagtcttatatgaggcagaggagaaagtcagaactgttatggaaagattgagaatcgcccagtctcggcagagtagctacgcagacaaccgtcgaagggagctcacttttgaagcangggacagtgtgtaccttcatttcactcagctcaggggagtacaccgctttcaaactaaagcaaagttggaaccacgctttgtgggaccataccggatcttgg

SEQ ID NO: 78262 - DNA, 306 bp, Oryza sativa
  unsure (1)..(306): unsure at all n locations
tattcgctctttgatcaaaaagataaagatctgatagattctaaccgcaattgcgaagggtatcactactatgccagcccaaatcatgaacttcaccaacttggatttggttctctcgcgaaaatctcgagttgcagagatgagaaccatgaaaagcaagatcccgcataataaaacagaaaccgaggaaaccactcgagtgaagaccactagaggctcgtcttttgtcaatctttgctcctctttcactcaatgattcatntcaatgtccccaccaacaattctatatgtctattcatagggcct

SEQ ID NO: 78263 - DNA, 459 bp, Oryza sativa
  unsure (1)..(459): unsure at all n locations
ctagatgtatatgacgatctctatactttggatcttatatgaatcgcatgatgaagtaccacatgagtggatatataagaaaggaatccaaatctgccgaatcgctcatgttatgatcttctacatcctangtctccgcgttccgtcatctggcttatgttcttcatgtagcattcagatcgaatgactctatgagaatacgtcgatacttctacatattatgggtaacgtangagacatccctatgttcccncggaggtcttaattaccactgcttagctttcaattcgcctctgaccatcaaattaaatgtgaataacccgtcctcctctctttgacacaaagggcgcttccggttctgtgcgtgcgttcaaacaatattgtcttctccatanttacatatctctagagtcaataattttctatgaagaactactgaactcaatcacttgctgccgt

SEQ ID NO: 78264 - DNA, 432 bp, Oryza sativa
  unsure (1)..(432): unsure at all n locations
tgcttatcaaggaggataccgcatgacaagttatctattaattaataatagtttattagtttccttttatctctatgaaaatatgtttagtgtcctataaggactttatgtattccttttatctttaggaaagattctttcttgtactacaaggactgtatctccccatgggtataaatatgtacacccggggtcattgtaagatctctctcacgatcaatacaattcggcgcatcgccaccttttgtcttttctactttattntatcgtccgacaggacttatcacctgacgctgggctgcatcggttntgatctccggcgaaggggtaaatccaatattccaccggcccacgcaatcgtatctacgtcngtgttgttcaaggctacatcagtacattcgacctcttggattactctggtctggttgatat

SEQ ID NO: 78265 - DNA, 196 bp, Oryza sativa
  unsure (1)..(196): unsure at all n locations
agttgaaaaaaaatcatcttattctatatgtgaaaacccttanaatgtatgatcctttgtacttctcacatctttctaataattttctcaccttactcccaatttaatttgctcccattgacacgtgctaatggtaatgcatgacaaaaatactcgggctgcccacgcataagcttttattggtgaggctcaccgg

SEQ ID NO: 78266 - DNA, 402 bp, Oryza sativa
atcactctgcagaccatgaagtaataagtgatcagtatgcacgtcccaacatatgttgttatgttcctgaaggaaatggtgcatggcatattggaagtggaaagtgctatgtggaccaatgcttcattgcgctggatgccatggcacggcatattggtgcagagataactaacaaggaggcttacgtgcttgattacacaaaatagagatcatgtgatcaacccctcacatacagctgcttaacgaactcatttttcaagaaagatcacactctgagaccaatcccatcaacaatactatgattgtgcctcttatctgccgcacctcctggaggcttttgacaaccggccgagtagagtcccccatcacactaggagtgcacatatactaatataacaacac

SEQ ID NO: 78267 - DNA, 469 bp, Oryza sativa
  unsure (1)..(469): unsure at all n locations
cacgcgtcgtctcgtgcacgctngttgttgtctgtggcaacaccctgagcgcctctgcgggcaccacactctgcacgtcttctcgcccaccgtatctagacacctccccgcgccttgcgcggcttacagtcagctgtcagtgaatatgactactcacacctcccgtcaccctgagaggcctcccactgctcccgagtgagatggagcttcccgccaatggtgatgggccccaagagaagctgttgctcattaccatctaccaccttgaagcgacctaacgccttctcgaacgatatcatggagaggtccagcagagattcgatcgagcgagcgatctgcctgtacttctcaaggacgcagcggaagagcttctcgacagctatctactcgtcgtaagtgtcgtccccgactcgaccatattctgcaatagagtgttgagactgagagcgaagtatcaacaatctcacct

SEQ ID NO: 78268 - DNA, 443 bp, Oryza sativa
agctttaactggccagcatcagggcatatggtgttgaggcattgtccaatatatattggcactgtgaaatgtagtcactgttctccgagaagcacttgagggtgctttctgcatgtgctcgctcagcggagtctctagaattgtaaagcttttcacataacagctctaactgtgctaagctctccattgatgacatgaataaagagctccaattttccagtagaccaagtatccaatgttaatatccacgaatttgcatgaatgtttgtcacaagcttatagttaatgcactacgtattcggttcaacaggaaacttgtaaagtaccacaagagctttgaagctgaaatatatgattctagcacacgagaaggatagtcacatactcaatacattcatattacaagagaaatgttcaacaaaagagttttctcatgtacagtc

SEQ ID NO: 78269 - DNA, 455 bp, Oryza sativa
  unsure (1)..(455): unsure at all n locations
aactcagcttcttctttancactaattctgatcctaagtggtctattatacgcctttatngaagcagatcacacatgtaagagatatctcaaaaataatttgagaagtaatacagtaattcaccaatttcgagtgaaatggtgaacagaacaccgagaaataccttgctcgcccatgtcgaaaaccataatacacccagagacccataggagtagaagaccgatggccagccaaaggtatgtatcattaatggtgaagatgcagtcctgtcactgtcccaggtacattgcactatacacgagagccaatgatctgctcctctctgatacaggaacccatgttgaaagaatattattcatcgcaggcatggcaactccctgtggatagattntatatgtttaccgtatcaataagaggtgcgtagaagatatcaaataccaccanaacaaccatga

SEQ ID NO: 78270 - DNA, 432 bp, Oryza sativa
agctttatctctagttgaagatcgaatcgatgcagctcaatcgatagcaagaactctgttaaataaacgaaagtaaaatggtggcgatgcgccgagattgtattgaacgattgttaattgattacatgggttcgggtcatatttatacccaaaatacaagatatgtccttgccagacatgacgcttatttctaacaaactctaagataccataagtctttgcggcagactcttgcccaaacatttctctaaggaaattacataaaatatcctaattaatagatacaattgcctatctgagagccctatctccatcgcggcaatcttctggaagcatcttgattgattctagaaacgtctttgagaccgccattatcagaatcggctgcatcatcttcatcggctgtatcagttatactctgtccgatccatc

SEQ ID NO: 78271 - DNA, 476 bp, Oryza sativa
  unsure (1)..(476): unsure at all n locations
ctcagcttgtggtagaacgngtttcgttctantgcccggatattatatttctatttcttcgtatgctctccattgcttgtgtgataacgcctatgtatagaatatataacttcgatcatagggatcaatttctagtcgcgtagcttcataatatatttagtcaaacttgcgcataatttccttctgattgagccaacatccggtacggtcgttcgttctattcaataaatcttcggtccacaacccgacatgagggtttatctgttacgggtcctcccttctgtcaatagtctatgcgaatatactagagaataaaactgaaatagtccatctcatatggaccgaatgagctggtattttcaagaaattctaaccacctatcacaagaggttttctaacccaatgattctataatgctgaagaaacgatgctcaagaattcttgtctcacgcccctattaatgagtaccctttacg

SEQ ID NO: 78272 - DNA, 322 bp, Oryza sativa
aatgctatatatggagaatggtgcaatgattagtcatctacaagggcccagtgaatttgaaaaagcttgatcagtaacattacgtgttaaacattaaagtttcagaaaatctaagccaattcctacaaacattgaagcaatacattaaagtccagaatcatagtctattgtaaaattcaataaatctaagcgacataatatgtacatgacatgacaaaccacacagtcatcgactctttatctaagcaacaaccactcacaagcacaaactattgcatcagctaagaagtgcttgcacaactatgcttataaccacgagctc

SEQ ID NO: 78273 - DNA, 489 bp, Oryza sativa
  unsure (1)..(489): unsure at all n locations
cctttanactcagctttgatcgatggttcaacacatcaaccttatnatatgtactcttggtctcacaagtctgttcattatcacattttcctgacacataggtatagtaaacaggataacctgtacctttgaaataatacaggatctgagttgcagagatcaaggtgcatgagcatcaacacttgatagtagtatgatctttaccaaaaagagcaagtgcagagtatatcggtttcttatcacaaacttgatcatgtcataatcaagtgtggttactataagaaatgagtacatatgttgatatgaaaagatgaacaatgaacttgatagtattttcctaacatcaataactcgaaaatgtagcagatatgcgcagaaatttgacatcattgagcctcatttccaacaagtcaataaatgcagaacaatggcctcatatatatgaagaatgtgaatacttcctccgtttacaatataagtaatctagca

SEQ ID NO: 78274 - DNA, 369 bp, Oryza sativa
agcttttaactgtgtaattcccagggccatgaattaccaacttatcttatctagagattgcaagatttgaggctttcttgccttcgataaaagcgacaaatgttgtgattatcctctattacatttacgcctccaagtgtgactgtttgtgatgtgtagtcatgtagtaatctgaacaaatgttttcaagttgcaaagtacaggtttacatatacgacccagtgagtgtataggtgcacatgactcactgaggatattgcacattacacatatttgttacttttcttttcgtgtataggtagttaatccgtccattctatttctcaatgagatgacgtttctgtgtttttctttatgagaagatattat

SEQ ID NO: 78275 - DNA, 442 bp, Oryza sativa
  unsure (1)..(442): unsure at all n locations
cgacggaggtctgccggctcggaggaactgataatgggctgcatgtcttcgagcacaaaaggagtagagttctcttgcattattatttgattgcctcctcagcatggatccaagccgataatttaccagtcagaggctctacgcatgcagtaaagcattcctgcacatatccaattggaattaatatatatgcatgtacgtagcaattgcatgtgagacgcatgcatgtgtcccttttaaacgggtttaatctgaacattagctcangccaaattaatataattgtagttatttatatatactgatttaaacatataatacatgggtgggaaagctgcaagctatgtcttataggcgaggtgaggggtttagaaaagaaagactgctcangagggtcctgaggaaacttcagtgtggggcctcatnagttctttgtcgtcct

SEQ ID NO: 78276 - DNA, 431 bp, Oryza sativa
agcttgtgtgtattaagggtttcgctctaatgcccggaaataatattccaaagcctttgtatgctctccattgcttgtgtgtataaggcctatgttatagagtatataacttcgatcatagggatcaatttctagtcgcgtagcttcataataattttgcaaagctttcgcataatttccttcggattgagccaacatccgttacggtcgttcgttctattcaaaaaatctccgttccaaaaccgtacatgagggtttcacctcataccgctcctcccttctgtacatagtactaagcgaaaaaatctagagaataaaaatagaaatagttccatctcattatggaccgaaaggggctggttattttccaaaaatctctagccaaccttcccacaagaggtgttcttaacaccaatgagttctattaatgc

SEQ ID NO: 78277 - DNA, 415 bp, Oryza sativa
  unsure (1)..(415): unsure at all n locations
tctgtcttacgtgcgactatctctcttataaagaattataagaaacgatcaaatnttctagtatttactagaaaagggggctttctacatacggatcgtccaaacaacgattttgccctatcagctgtatgaagaaaggacacttcacgagaatcaaaatatgaagaaagaaagtatggcctatactactctatggatagagatctcaaatcgatagagaaagcaccgttaagatcatttagtgaccgactgggtccatacaactaaaaaaaactgcttacttatcccatgatatggggcaaaatttaggaatccgcttatgtaatagagccgatccactaacggattaagcagcggtgtagtatcagatccacagatagttagtctttttcttggtatggcgaaaagtcttttc

SEQ ID NO: 78278 - DNA, 167 bp, Oryza sativa
actttatcactgagctgcactttgttgatctacctactacatgagcttgctgtctaaattgaatggtgttgtgcaacttgatcagaatctgaattaggcggttattgggaaaaaaatttgggtacatggacttgacaatgtggaaggttttgtataagaaaactatt

SEQ ID NO: 78279 - DNA, 394 bp, Oryza sativa
  unsure (1)..(394): unsure at all n locations
gttctggttgtgttttaaatctgctagcatcattataaagcttcctaacaagtatatttcctgcatgtctgtctgtgttgaagattctaatatcaagtataccaatcctatgaacagcagagacaggagagcttgatgtaccatggtcactatcatcatagtcatgaggaataaactctngcaaagacgcaagcttgctaaaagcttgtgtttggtggcactagactttgtttatagcaacaccctcatcatatggaacanctatgggtgactttacaacatagtgggaggacatttgcaaattcttggatctagaaatatgccgaacctctttgaccctgtttaccacacgcactgatttttaagactggtagccaaagattcctacaaacct

SEQ ID NO: 78280 - DNA, 377 bp, Oryza sativa
  unsure (1)..(377): unsure at all n locations
agcttgttgatggtntattcttggagtcttgccgtgaggttgcaacaaagtatcctggaattcaatataatgaaatcatcgcggacaactgttgtatgcaacttgttgctaaacctgaacaatttgatgttatggtaagcatgttagttctatcattactatgcatcttaacaaatgcattctgttggtaacgtcaccatattctatactcacctactgatctatgcttttatcatgtcataaaaacaaaaacaaagtaaagttttagtatctgcttgatgtctacatatattgatcaaatgcacattatcagagtacttattaaattatctgcaacgaatgtgatagaatattaattccctatgcactaccgtctg

SEQ ID NO: 78281 - DNA, 389 bp, Oryza sativa
ttcttctcctttttctatgtggactatgaggctgcttggtttgtttgccgttgtaaccataccagctttatcggtgccaaagatagttaagatagaggtatatatggtgtgtttggttagatgccttgcctaaacttttgacatgatgttgagtcatgaagtttctagaattaccaaattttggtatggaggatatatgaagtaataattgggttctcaaagcctacaattatttatggccgataatggtaacaaaccaaacaacctcttagttacaatgaagttaatttatatagtgaagtcctacaaggaatgaacggatataacataatatggcgatgtttactgatgtcctaaccaaaggctaaacttctgaagcgcatatgtga

SEQ ID NO: 78282 - DNA, 391 bp, Oryza sativa
  unsure (1)..(391): unsure at all n locations
ttgtacccgggatcctctcagacacctgtttcattctagctttatctaaaattagaacacgacaggagtgatgattcatgccggacagcgagacaacatttctgcatgaccaagttagctaccaatactcgagaagtcaagaatcattattgtcagtttgtatggctgtctacaagtagtgctacatggctgtctacttgtctatactacagnataacggacacgggcaacaaatgatgttaccctttatcattacaagtgcttgccataacccattcaaatcaaaaaagaaagaagagtgctgttctacttcgagacagctagagcatggtattatgtagtgaaggctccaccaaaagataccatgttgcaaatctggaatactcgaaca

SEQ ID NO: 78283 - DNA, 335 bp, Oryza sativa
cccttttcttttataattataaaaataccagggttgtcgtctcacgcctaactgcttaaacggtacgcgtactttttttaccgcgccgattcacattcgaagcgcagtacaatctcatgaccatcgtgtcactttcagacgtagtatcgaagcctttctcggtggacaaccgtatcactgtacaagcctttatgacaaaatcatatgcctcagataacagcttgtttcgaccaacacgtgtgctctacatccccgtttcatcgcttatgcttcaataaggtgctaagttattcttccaccataaacaatgcagtcgtactcccctcaactggcgt

SEQ ID NO: 78284 - DNA, 418 bp, Oryza sativa
tttcttctattgagtgggtgagtacctatctgttgagatatgttctcttactattgaattcttatataatactcactcgatcgaactatattgtgacaacataattatgacgtcccaaaccgtgtgtttaaaacaataatctgcactacctccgatctcgaaatgatggcgtcctaaaatgtgtgtagtcacatgttcaaaaaatatgaagtcattaatagatgcaacaatatcatgattaaaatgtgaaaaatatattaagagaattttaatgaaaaactcatcgatgttaagaacatccatcaccactttataaatggaggtagcaacaaaataattgtgcaagtatataacttctgttccttcaccaactaagatacacattttttatttggaaaaaaagttgaattaccccctg

SEQ ID NO: 78285 - DNA, 374 bp, Oryza sativa
  unsure (1)..(374): unsure at all n locations
ttgcgggtgcctggctcaactccttcagcctagtgttcgaggatgagaggtacatataaattattagtaaaattcactattatattttctaataaaactatcgcaaaactaaatgttttgcaccatgttaagtataagattacaacatttatgactctaacataacaaattggtatgaacttaagccataaaatctatagtcttgtgataactctaatattaaaatctatatattntttttaacaagtcatgtgttaaaactataattatgcattgtgatgggacgccttannatatgtagtttgcaactaattgagcaaagtaactggtagtttcttatttacatgtgctacaggcttaaggggccacgcttc

SEQ ID NO: 78286 - DNA, 442 bp, Oryza sativa
  unsure (1)..(442): unsure at all n locations
agcttaagatgcangcataacaattattaattactccctctgtttcgggttataagacgttttgactttggtcaaagtcaaattgctttaagttcgatcaagtttataaaaaaattagtaactttttgaacccaatacaaatttattatgaaaatatattcaattattagtatgatgaaactaacttagtattataaaaattgttatatttatctataaacttagtcaaacttagaacagtttggctttaaccaaagtcaaaacatgttataacctataacggagtaagaagcatgcaaggaagtcaaacgcaccaaacactaaaacatatatataactacatacatcatctacatattattacactttaaagctcagtatatgaacatgttaaatcgntatttctcatgtcattctcacaatattgttatccaaattcatt

SEQ ID NO: 78287 - DNA, 411 bp, Oryza sativa
  unsure (1)..(411): unsure at all n locations
ttagcggatttcattgtcgagtggaccgagtgtcaatattacattcctgcggagaagctggagaattggactatgcactttgacgggtcgaataagccttcaagcactggagcatgggtcgatctgatttcctcgactggagaaagattaagatatgtactgtggatacactntctctgcatcacacaatgtggcggagtatgaagcgcttcttcatggacaaaggattgcagtatctcttaagattcggcgtctgatagatcacgatgattctcaactggttgtcaatcaagttatgaaagaatgagcctgtcttgatgataatatggctgcttaccagcaagaagtgcgtgagctggaagacaagttngatggcctatagttaactcatgtgcttctgcacaacaacga

SEQ ID NO: 78288 - DNA, 405 bp, Oryza sativa
  unsure (1)..(405): unsure at all n locations
tgcttatagacaacccacataaagaatctcaattcactctttgtttttntggtctacccacatgctaagccttctctcctgtaataattaattaaaggcagctttccggctaagggtaacaccaatgtatataacaaaagtaatctcatatagatgggacccacatatatagactataactaatgttatcttcacaatgtatatggatagcaactagtattatgaggagagagaaaatacagacaaataatatattttattctatatgggcagcccatatgcttatgggtggcttttgctattntcttgctatggactacttacacaatgtggttangtggctgaatggaatattttattgcttattgactacttttaagcagcgttcgagagggtgagagagtg

SEQ ID NO: 78289 - DNA, 430 bp, Oryza sativa
  unsure (1)..(430): unsure at all n locations
catgaacatatagtcttaattcacatgatcgccacgtaaaatatctacctcgtggaatttcaggttgcaccctctcttcatttggttgataataatgcacaataacagttagattgaagattgaaaaagttnttacacaaagcagattgcaatatagcattnttttatattgcctcattagcaacaatgggagtttctttttctcttggtttaccttttcagaaactattcatcataactaaaaagttaacacgcagcaatatctatttaatttgctataattatcctagaaggctaacctattttttcagggaaattatgaaatagttgtggacaggggagcagaccttgtaatttttgccatggatcaacagtaatctgctgagagctgaagagtataaaaatctgaggctataaaatctgattatgc

SEQ ID NO: 78290 - DNA, 449 bp, Oryza sativa
agcttaccgtctatgttttttctggcctacagctatgtccgatgcggacaagaatgtgcggacatgcgaacgatgccaattttttgccaaacaaattcatttgccagcccaagagttgcaaaccatcccgttgtcctggccgtttgtggtctgggggcttgacatggtcggtccatttaatagggcagtccgcggttacacacatcattttgtggctattgacaagtctgcagtggattgaggctaaaccggcatcacgatcacagcagataagctagagaattttcatcaacattgtgcatcggtttggggtacctaatcggatcatcactgacaatgacactcgattcactggtggagcatttaaagacttttgagaagacatctgcattaaagattgttatgcctccgcggcacaccctatgagtaacagacaagttgagcgtgct

SEQ ID NO: 78291 - DNA, 391 bp, Oryza sativa
tctagctggttctatatggtgttgacctctcgactgcatagaatcgttgtcgagctatgcactagtgtagctttacgcccttactttagtgggtccaagtgatttgagtgccttttcaccactaactagtattagatcacatctgtgaatctattcgcgacgttagattctcctgaacttttcagtatcgtagacagctcagattctctcgtcgatgttcaaaatataagaatatgattagtctgattcggcccatgccgtattatgaattaggccttgtagacttccatgatcattgtgtgagagtagttcatatgaaaagtctagataaattcgagccaatttatataactagataactgcaatgataatatcggccgtgattattatg

SEQ ID NO: 78292 - DNA, 454 bp, Oryza sativa
  unsure (1)..(454): unsure at all n locations
agctttcacgatggttatatgtagtccttgtatatactgttcctggtctagtcctttatctactaattttgtataacatttttttcctttccttacttaatgaaattagaaagatagatgttttccagtttgaaaacaaaagatcctgtcctgatgccaattcaatgtgtatttatttttgaaatcacctagtgatttttggtgatttaaaaaataacctgtacaacaaagcatattgtactgtgcagcacanaaatgtgacacacttgatacttaaatactacaatagtgcctattttatgtctgataaacccataacagaatacagataccaactattgtcctagtgatttcaaaaataacctgcacaacaaagcatattatactgtgcaacacanaaatgtgagacacttgatacttanatacaacaattacgactatttcatgtctgata

SEQ ID NO: 78293 - DNA, 523 bp, Oryza sativa
  unsure (1)..(523): unsure at all n locations
ctataaaactcagcttatgtccttggggcagggtcctcaaggagcagcaccatgttcttgatgtggtcactgtcctccctctccttgcccctgaacaggggcctctgctccctgngctccagccctgtcaccatggatactactgccttcagctcacctgcacaaaatgcaacatcacatgtttagatcttgatgatcaatccaaatcagcacaccaattaggttttattttgttgttgttctaacaaagaaacaaacaaactataggacatcttntttttttagagcgggtaaagtatgaaggacttttgactgggatcctgtggtaaagcaataggtaaagtatgaaggacttttgactgggatcctgtggtaaagcaatagttgtgctttactgtcacgccacgcctgtataacgtttacatatcatcgtgacatatttttctgataacatatactcctatcaccgcgccgtgtttatgtaaaatggaggtgccataatccccttgctcgtgcctacaac

SEQ ID NO: 78294 - DNA, 397 bp, Oryza sativa
  unsure (1)..(397): unsure at all n locations
agcttggaatatatttacgtctaagctcttcaccgagtttgcaacccgcctagcaatcatacgccgntcgatgaataccctcaaataaccgaaacgttatgggaggaattctgctctctgaagaatacccaagagtttagggaatcaagcgaggcacatcgcctactgcaacagcggaatgagcacccgcatcggctgggcactacagggtacatcggcaaggagccaatatgggcccaagaggatgcagccgctgcagcagcgaatgtccctgccccgttttcggacatcgctgaacaaagagctcgcaactgggtgcgagctaggggtaaggtcataccaaatgactctgtcacattgagaaccanaatgatgccatcgtctatcaggaactggt

SEQ ID NO: 78295 - DNA, 382 bp, Oryza sativa
cggatcggcaatgttcaattagcgcctaccgctgtgttgaattctatccttaaactatggccgttccggggtttgggcttggatatcattggtcaaatttattcttcgtcatcaaaagggcattggttcgtgctagttgcaatggattacttcactaagtggaccaaagccgtgctgctcgagaatattacttgtacggaagtaattgactttattttgaagcatattgttcatagattcggtattcctcaaacgttgaaggagcttcttttatgttcaaagaagtgagaagttttgtcgaatcttatgatattaagttgttgagttcttctctttactacactcacgctaattgataagccgagtcgagtaataaaacatt

SEQ ID NO: 78296 - DNA, 443 bp, Oryza sativa
  unsure (1)..(443): unsure at all n locations
agctttatgatctgatgacgctccggtgcctctcaagcctacgaatgtaacccaattgtccttacagccctccatctctgatcttttcaagctcgtagcaaagtgcctttacaactcatcttttatatggaaaaaatggtggtacaatcttttatagggaaaaaaattgtgcacctgaactgcataattaatcaagttttcagcaattcagctcttgaatagaatgcaattacttgaaccggaggcttgattgttgaagtagtattgatggaatgaattgttattcatctctccttttggcaagtgaatgaacagaataaaagaaaattagtttgacaagcacgtgccaggctaccacttttngttgagtagtccattccagaccaggaagtagctagatggctatgcaaattcagcatttttcaagacgaatcacatagaca

SEQ ID NO: 78297 - DNA, 469 bp, Oryza sativa
  unsure (1)..(469): unsure at all n locations
gctaattggtaagttggtatactgcacaactgtaacacatctgcatgcagaatcgctagaagttggcagagaccatgccgtgtttgttggtgaatctggttcgttagatattactcagtactatagattggttaggatcacatcgatcatcanatgtgatatatactgatgcactggtgagacattagccacttaattacttggtggcagccctgcctgattgctgtgtgcttgagctaacgcaacacagcacatggcatgcacgatgcatgttgaattggtatgactggatggatcatacagtgctcaattatgatacgactagatcatgaggtgacagatcatgcatgatgccaatggtcttgtcangaaagggaaaaaacttatcgacgctattatttatgctccttatatatagttcctagcttatgtacatggcggatgtgctgtaaatctctctctgtgttga

SEQ ID NO: 78298 - DNA, 419 bp, Oryza sativa
  unsure (1)..(419): unsure at all n locations
agcttttttttcccttgataagtagtgtgtgatgagagatttcataggacaagtttcttctcatcaatgggtgagcaattgtcaacaaataaagggcagaaaaaggaggagagaaggtggagtatggaatccatggatttgttgtttctctcacaatctgtgtctgaaatcctgcagctcctatctctctttcatctttcttctttctgcctttntatcttcagcataagagacccatcaacctttgcatcgtgcgatccattactgcattacacatcagtcagcaccgagcaaagcaaaggattccagcatcttgctgaattttctctcgtgcaaatactttgtagaataagattatttttgtttctcttggttaacttanaataagttataaaagtaattattgtatctgagtttat

SEQ ID NO: 78299 - DNA, 367 bp, Oryza sativa
  unsure (1)..(367): unsure at all n locations
gggcgcacacganagaggacgagggcttcaaaagacacgcgcgccctctacctggcgcgccagatgacggagcgtggggctcctcaccgggagaccgcgcaggccctcctttgccggttcggccggnggcgctaagtgaggttcttcgccctcgatctgaggaacgtcagcgagaaaagaaatgcgcaagacacgggcgacgtatacaggttcgggccgctgagaagcgtaacaccctactcctgtgttctggtggatctgtgtgtgaaggaatccatagggcggagagcgagagagagttcaggctctatgaaccattcgccagagtcccaactccccctcctttcttttcccccctcttcttttc

SEQ ID NO: 78300 - DNA, 448 bp, Oryza sativa
  unsure (1)..(448): unsure at all n locations
agcttattgtttggtcacaagacaataaaactaagctgtaagtatggccacaagacaataaaatatatgatttgctattcatactaataaaatacaacattgcattgaattgtctatttgtaatcatttggctgccatgcgggaccttttgccattttctttcttttggtgggacccagcggggcccactttattntcttacctatgccctggttagatatcaacattttttcttcaaacttctaactttttcttcacatcgaactttcctacacacaaatatttaacttttccgtcgcatcgttctaatatatttaaactttcaattctgacgtggaactaaacacaccccttatcataagcatgatacatatggatatagctgtggctctatctagtggaccccactcctattactcacggtggcatatacgttggtctagacctt

SEQ ID NO: 78301 - DNA, 419 bp, Oryza sativa
cgttacccgtacgtgtagagaaagggctctcaaacactcatgtacacaacgtagcagctgctgatcgcatcgcttttcagtattaggccagccagctgctctcgcaatcgcagctgtacggacgtacacacatacatggttcggcttaaaaatctttcctgccattccgttgcgatcgatcgagtccatggtggtggttattttccttttcctggccagacactttgtcgccaatttccttatttctggcgtgtgcgctgtgatgctatttccctgccattagtatgtccagatctcgcgtaagcgagcaagcaaatcttttctgtacgcttctgcgatctgtaatgtatatatgcataggagaagagatagaaatggaatgcacgaacgaatgacacttgcttgacagatagagggag

SEQ ID NO: 78302 - DNA, 424 bp, Oryza sativa
tgcttggtgtatatcttggccgagttcggaataccgaacggtgctgagacctggtctctccctgactggctcaaatccgagtcaaggagagagatcttgccgaagtcgctggtgatgaagtcgaggctgccgaaccggaacgcctgccctggagggaaggcaaagtcgtcgatgccggagacgaaacccatcgcactagtctgcgaaaaatgtgacgctccccctacttggcgcgccaactgtcataacaagatttcggcaatactaaaagggggtggctatcaatctatacaagtggatgggttcgaagacaacgaattttatatacgttcatgccttcttaatcaagaagtaataccctactcctgtccggtgattgatccgccgagtgtattattgatcgtataatctgggagaaaatcgt

SEQ ID NO: 78303 - DNA, 479 bp, Oryza sativa
  unsure (1)..(479): unsure at all n locations
taatacgcactgataaataaacaacgaacagtaggacatttatagtatggtctanaaggctntgagctagatcagcactattatgtttcttgtgtacataatatgaactgaatcagcccaaaaagaactttaccttagcaaccaaagagaatcattgcatacatttcanaggtatcctaagcttgatataatgaacgaaagccccaactgcgagcaaagaaccatacggngcatccttgttgcctctgcgaaagaagggttgtcaatcgggaggaagcctttggcataagagaggaggtaagagctataggagagattggaggtaccataggaagtgacggcacgagcacgaccttgctagtgtcgagcccaccgtatggctgcagaatcgcatgcaagggacgcaatgaagaccaacgagatgccaactcgtcatctagtcgttatggtaggcacgagatcaactggtgtatggagaa

SEQ ID NO: 78304 - DNA, 445 bp, Oryza sativa
  unsure (1)..(445): unsure at all n locations
agcttgaattgaaatgcatgtatgtaaacataaccgtgcaacggggtgtggatcccctggagntgcttccaaatccaccgggtggatttacttcatccaagccggccctttaatttgatggattaaattaaaccaatcctttctcctcctagttgctgctatctcgtagagcctattttctttcaaaaaaaatgatgtagagcctataaaaaaacgttatccagtatatgagagaacttgttatcttcaaactntattcaaactttatgacaacaattagataagaacaaacacaataaaaacattgcaccgatagaagcttcttgttctgtcgattattaggatgaatgagtttgatgcaggtctcgatactgttaatttcataacaactcagttaaaaaaagttcaagataattaatntttccttcatgatgctcttcggaag

SEQ ID NO: 78305 - DNA, 435 bp, Oryza sativa
  unsure (1)..(435): unsure at all n locations
gaaatgccatagaacaatcaacgacagataaatatggactgaaggaaattattctgggagctgatgtgtganagtagatagttatgcctcatgtctgtagcctttctttgtaagatgcactaaagtagctgggtagtctgtatatagttaagagtatgcagggacagtagtcatagatgctacaaatntgaacccccttttggttcaaatagcaaagaaactcatatctgtacaatatatatcttttatcacctggcgtgttggatgttatgaaatctgcacagtgattgatttgttaaaaaacttgtggttgtttctctgattccttgcgaaaataagatctgcaatattgtgtaatctgaaatcctgatgttcaaatctggaatgtggggccttgtcactcatattactctttaaaccatctcaatattgcta

SEQ ID NO: 78306 - DNA, 315 bp, Oryza sativa
  unsure (1)..(315): unsure at all n locations
agctngtgacatcatccaatgaagtatagccaccagaatcaactcttgtatacttctcaaaagcctgataaatctgccaaccccattccctataccttgtgtaaagaaaaggagataataaaaggatagtcagtggtggcattattgcctggctatcctccccgccgtggttacccnctatgaaccctaacccataacattattcaaaattgagtggcaggtgacctacagataataaatagtgttatatcttacttccgatcctctgtgaatctatataaaacanatagtgattctacaatctctgggcgtaaa

SEQ ID NO: 78307 - DNA, 446 bp, Oryza sativa
  unsure (1)..(446): unsure at all n locations
tactaagcttctcctcggtttacatcgtcaagcggtcaagtgaataatgaggtatttgaatcatacacttgagtttggaatttggtattctacttcatcttctatatgcttaagtggatattccgatgctgattcttggggttgtagaattgataggaaaagtactagtggaacatttcattttcttggtacatcattgattacatggtcttctaggaaacaatctagtgttgctcaatcaacggctgaatctgaatatgttgctgctgctagttattgttcacatattctttggcttttatctactatgaaatattatggtcttacttttgagaaagtacctatcttttgtgataatactagtgctattaacaatgctaagaatcctgttcaacactcacgcacaaagcacattggatattcgtttcactttntgagggatcatg

SEQ ID NO: 78308 - DNA, 500 bp, Oryza sativa
  unsure (1)..(500): unsure at all n locations
ttatgttcggcgcagtactaatactggaacttatgagcaagaattgctctatcaatcaccatctactntagacatatcttctgaaacttttttcagatccaaaagtccagtatcttcctacaaattagtgaattaggaggagctctttgtgccgaaaaagaaagagcacggcaatatttcaaacttgcattcgaactgcgaaatatttatacaaaggaggagagatcaagataatgcagcagggttggttatctaattggctagtcaaacatgaggtggttcatagatctttgggcttcgatcatcgaggaatagagactctgcaaataaaagcagaggattgcgattccattgctggcatattatatgtatatggttacaattatatacgttcccaatgtgcttatgacgttgcacccggtggatctttagctagcgtgtatcatcttacgagaatacagtatggtatagataacccagaagaagtatgcataaaagtc

SEQ ID NO: 78309 - DNA, 459 bp, Oryza sativa
  unsure (1)..(459): unsure at all n locations
agcttgatggttcatatatcgattgataattcatcggtcacttgtgatactattntggttacacacatcgctaagaccagaattgttcaggattctctccctagtgctcctattgattttgacaacaagaaagggaaaggtgttattattgaggatcctcggcctgagacaattaggatcaataatgttaaggccgaagatcataaagttgcaaaagatgaatcacctagtttcaacaagactaanaagccgaagctcacttttgagatgcttatggctaagtacaagaaaggttagccggtcaacgatttgataatcaaactagtgattcgaagagaccaagatcatctcgtangaagagaattggtcaaacaccaaagcaatcggagacaccaacaatatcaactccatataaacctncggntgtgatgccatggtatccatatccaatgtcactat

SEQ ID NO: 78310 - DNA, 447 bp, Oryza sativa
  unsure (1)..(447): unsure at all n locations
ntagcggcttaatccgcggataatcgactgtccggagcacgccttctccctccggccgaactcacgaaaggggggtctcacgatctcctgctagagaggattgatcctcaacaaattcaaattacaatctcataatgattatacaggcatcttattaaagtcgtgcaatgcacgactatgtggcaagtacctgtgataacagattangatatagagttaggtttggattgtaaccgaaatttctaaatacctgccacgttggagactgtttctaactcatatcaatatatacgtgcagcctagaacagatatgataacgcttcctaaacaattatagacatgacgtgaagaagatgaagacgttatctcaagaaggcttgagcagctacttcaggcatgagtattgtctgaacttaattaccttgcgtgacctctagacaactgatc

SEQ ID NO: 78311 - DNA, 428 bp, Oryza sativa
  unsure (1)..(428): unsure at all n locations
agcttgctactaggatgatacttcttgatagttggtgtaacacttcaattggcaggtcataaacatcgttaaaaggaacatttttatataacaactcaacagatatgaagggaatatttaaagtcctaatgtcaaattaacccacttactatgaataaaataatatatctgcaaaaaaacatctaaagttgacaactaatgaactcagctggtgcacattatattgcaccagtattaaattctccacgagtttatcattatagtattgcttttacaatgtatagaaactangatagtacacaaaggaaaaatatggaaaaaaaagaattggattatgataacacgataggcagtcattntcaaggttctaaaactcagcagctagtattcattcaatcacctcactgtggaatgcatatacaggaacc

SEQ ID NO: 78312 - DNA, 443 bp, Oryza sativa
  unsure (1)..(443): unsure at all n locations
gtagtgcttgtcaagccggcangcaagttgcatgttctcattctactaaaagtatcatatctacatctagaccattggagctcttgcatatgattntgtttggcccaccaacctataagagcattggtggtaatagtcattggcttgtgattgttgatgattattctcgctatacttgggagttctttttgcatgataagtctattgttgccgagcttttcaaaaagtttgcataaagggcccaaaatgaatttagttgcactcttgtgaaaattagaagtgacaatggttccgagtttaagaataccaatatcgaggactattgtgatgatcttggtattaaacacgaactttccgctacctactcacctcaacaaaatggtgtagtggagagaaanaatcgtacattgattngagatggcaggactatgcttaatgaatat

SEQ ID NO: 78313 - DNA, 450 bp, Oryza sativa
  unsure (1)..(450): unsure at all n locations
agcttaacatgtaactgttccacgtcatcatccactagcaattattatctagagtatgttagatcacatgcaagtgtaccatatcatcacccattagcaattattatttagagtattttaaatatcatgcaaacatgacatatcaattataattntgctgtatttttagaactcaatatgcaagcaatattaaatcgttatatatctctacaccatttttacattattgaaacatatacatctaccatttcactccataaatcatgggattagctaaaaagctgtcgagtattntttaggagaaactttcgaatctaactacattatataatttcattagaactatactataataataataacttgtatatatgtattaaaacaatatatgcaactgtatatcttatatagagataacaatttagttatagtgtagttacactatactta

SEQ ID NO: 78314 - DNA, 154 bp, Oryza sativa
aaatacagagtatcaaaattaagctaccctgataaagggtatcataaacaaacctcgtcagtattatacatagacaaggctactccaccagcaccagtaaagttgaacacatccaactctattggttcctctttgccatctataccagttttga

SEQ ID NO: 78315 - DNA, 448 bp, Oryza sativa
  unsure (1)..(448): unsure at all n locations
agcttttttgttactatgagagactaaatcgaatcaaacgggttttcataaagacagaacgtgaccacatgctggaccctcagcagcaagattccatgatcaagaagtggccgcccagtgaggttttggaaatagatacggatcatagcccctttttttcagcaccagaacagctctttaatctaatagtcaaatccctatgatgtaaatctgcatacaactcatacatccaaggagacttctccaaattattgtaccactgcatatacacaacaactttaaactgatttagagccacatctttgtgaatcatgctcctgaggagatcgtggcatgtctgcatggtataagggtggaaggttgcaagcaaagcanagttaatggaaaccaattgcactctaatctgcanacatggaactcaagtcagtattgtatttcatttagatca

SEQ ID NO: 78316 - DNA, 438 bp, Oryza sativa
  unsure (1)..(438): unsure at all n locations
tacagagctngcatatcaagatatgtgtcaataacaacagtgcaactaatcttctagaataataaaagtttccacaggcaaaaaaaaagagagtaaatttcatacaactacaggtattntgatcaatatatcacaaaactacaggtttaatgctaaatttatcacaaaactatagatttaagatgtaatatcacaaaactacatatttagtaacaaagttatcacaaaactacaggtttattgataatttaatcacattacttgaacaattatatgtccaacataacattagtactaaggaattaagccctanaatctgtacgtttgtgataattntattattaaatatgtagttttgcgatacttagtcttaaacctatagttntgtgataaatttattgttaaatctgtagttctgtgatacatcaccttaaatct

SEQ ID NO: 78317 - DNA, 403 bp, Oryza sativa
agctttctaattatacctgcccctgcttgtcctgcgctgttcctctctatcgactctctcactcctgcacatcacaggcaggcaggcaggcacaggctgtgtccccaacacaacacaagactactactcccaaatccccaatttcattctccttgatcccacccagccactcaatcccagatccgaatcccacctctccgtctcattctccggcgccggccagaaatgctgccctcctcctcctttaggcgttggggggagctagagctctagctagctagctaggtgcgacgcgacgacgtgatggctggtattgctaaggagaggcggctgccgccggcgctgccactcgccactctcatcggccgcgagctccgcgccgggggctccgagcgcccctccc

SEQ ID NO: 78318 - DNA, 519 bp, Oryza sativa
  unsure (1)..(519): unsure at all n locations
ggaagtggcgaatggttgctgngatctgagaggagagcgagctaacgcggtagaggttgaacgcacgcggccaaagaaagaatatcgaggacgaaggcgaccgcacagcttagtagtaccattaggcaggcagattagcgccaattattactctattattattattattattattattattattattattattattattattattattagtgatttcattatctggtgtttaatgctcttgtttcttagtctaatcacaatgtatggaatcacaggctcacagccaaccaacccaccctccccctggaggcttggggacagatttacaccaacctttgtacttccgcccatcttctctntattctttnttattcgtctccggttgctggcatctcanaataatactcctcctcctactgctactgtgcatactactatgcataacatcgtttcattccaagtgcgagctgcaactgaaacannaatataaatccttccaaatcgagagtaattaactat

SEQ ID NO: 78319 - DNA, 427 bp, Oryza sativa
  unsure (1)..(427): unsure at all n locations
agcttggttattatttgtgagctaaggttaattttacattaagcccttccttatacttctgtgttagtcgaatccctgaatccacatgntttgtccacttaattaacatgcaatataacgcaaatcattctcttatgtaacacaaaagtcctgtagcagcgagattgcattaattgaagtcatagtattatccaaacttattttccccctcaacatctactttgttggtctgtgcaggaagaaaattgctatgcgtccgactgatatgtacaacttacatccgacaagggcggagctagagtatttggnggagggggggaggacggctangaacccgttcaagaaaaaattgtacctatacctgaatataaatttacgcactggtattagcttaaacttgatataaagcagagtacattaaataagt

SEQ ID NO: 78320 - DNA, 392 bp, Oryza sativa
  unsure (1)..(392): unsure at all n locations
gtacaatggtttctgggtctagtaggatactaccggaagtttgttcgttccttnggcattatcagtcgtccactcactaacctcttaaagaagaatgtggtttttgtatggaccagcgaacaccatacggcttttgatgctctcaaagcagctcttactttagctccggtgttagttttgccggattttaccaaggtctttgaaattgagaccgacgcatccgacaaaggagtgggagctgtactcatgcaaggaggacatcctctggcttttctcagcaaatcgcttggaccacggaatcgaggtctttccacctatgagaaggaatgcttggctatnttattagcagtggaccattggtgatcgtacttgcaattcggagaggttatcat

SEQ ID NO: 78321 - DNA, 386 bp, Oryza sativa
agcttatatggagggcttgggaggcggcgacagaccagcggtgggtggcagacaacggtgagcggtgagacaagggatcccaaacgaacatgagtcggtatgtcggtttatatgatctccactcaataataaaaagaaggcatgagcagggtttttttttttgagagtacaaatgcaggcgcccataacatacgcacactcacccctataaacatacacgcatactctatccctatgagcacctccaaaagactgagaggaaaaataatgttatagagatacccaccaccaatgaacgtagggtttcctgcactttatatgtcgggcatcacctgttgacacagtcacacagataaatataaaataaaatataagattggtatata

SEQ ID NO: 78322 - DNA, 509 bp, Oryza sativa
  unsure (1)..(509): unsure at all n locations
ttcggcaagggtatttctggccaaccgccctcaaagatgcatgcgacatggtctagcgttgtgaagcctgtcaattccacagtaaacacacaaaactacccgcgcaagtgctccagactatccctcttacttggccgttctcgtgctgggggctagatatacttgggccattcccacaaggacaggacggctacaggttcctattcgtggcgatcgacaaatttactaaatggatcaaagcagtacctacgggggaaatcaaggccaacaacgccatcaaattcatcaagggaatattttgcagatactgactactgcaccgcatcataaccgacaacggctcccagttcatcagcgccgatatccaggattactgcatcggactgggagtcaagatatgcttcgcctcggtctctcacccttcaagccacggacaagtcgagagggcaaacggcatagtgctacangggatcaagacacgcgtctacgacagactcatgtcacatgac

SEQ ID NO: 78323 - DNA, 447 bp, Oryza sativa
  unsure (1)..(447): unsure at all n locations
agcttttgaagacagttcctgccatcgntatgttggcggggggcatgtttgcgtcactgaatgcagctgccgatgattccgtttttactgtcatggatgatcctgccagcgctaaaaaacctttcgaaggtaatctgaacgcaggatatcttgcacaatcaggcaatacgaaaagctcctcacttacggctgacaccaccatgacctggtatggacacaccactgcctggtcgctgtgggggaacgccagtaatacttcttctaatgatgagcgttcttcagaaaaatatgcggcgggcgggcgtagccgttntaatttaactgattatgactatntatttggtcaggcaagctggctgacagaccgttataacggctatcgagagcgcgatgtgttgaccgcgggttatggtcgtcagtntttgaattggccggtacacagtttcc

SEQ ID NO: 78324 - DNA, 451 bp, Oryza sativa
  unsure (1)..(451): unsure at all n locations
agcttggtgtctattgtgtgggttcgattgaacttctctgttttagtagggactgaaaattaaacagcgttttacagtaaccacccaccgtgtataccacttctgcccttggctctaccacaccactgacgacgtcgtctcctgcgtggccgcatctctccgcgatagattccgttcagagatacagtacaaggaagtacacacgagccgacatggctgtttgctacccctctccctcgtttttcgtgcgcacgttttttaaactattaaacggtgtgttttntaaaaaaatttctatacaaaagttgcttataaaattaaactcaatcaatttttttaaaaaaatagctaatacttaattaatcatgtgttaaaagatcgctctattttaagtgcaagagggatgggttcctatcctgcactttgccaacacacaatatgcttctccatc

SEQ ID NO: 78325 - DNA, 442 bp, Oryza sativa
ctaagcttcgcttatacaactgcaggtacatccaccatccgccttcattacatattcctgcacggcttggttgcgatagataccacgcctgctcctatcaacacacattatttcataccgatgcacttgtgtgccttgagcaacaactctatgtctccgtgcctttttgattttatcttccatgtactttgtcactacgttgccaaacactatgttgttatcggccatggacggaccaattatcttgtatcgatccctaaagtaggcttgcgtgccgtgaaggatgaattcaacaatagcaaccaatggaagtacccgaactcctcgcattacccagttgtacacctcttgcaaattggttgtcattatgccataccgagatccatcggtgtcgaacaatagagaccacttctgcttatgctcattctcaatccactgactg

SEQ ID NO: 78326 - DNA, 445 bp, Oryza sativa
  unsure (1)..(445): unsure at all n locations
agcttatagtggagtgacatttgtccatatatataatgtanatcttacataaaaagtatacactatgcactctggttaatggatatagaaggtagctattgtcatattcacggtggtgatgttcttagtggtccaaaaaggaaactttgtaataaaagatagcccaagctaccattcactctatttacaatttgaagaatagtatccggttgataaactgatcgatgagcagacaatggagcatgtcatcatgtattaaatttctaagtgtcttaacgattaaatattgataattagtatttttacgaggtgatgacaattagtntcttgtaacatgtaatatatgttctcaatagctgtaaatatgttccgactctaaaatatgaatttattgtcaaaattgcaagtgccaatatatcttaggtttactactaatcatctctta

SEQ ID NO: 78327 - DNA, 474 bp, Oryza sativa
  unsure (1)..(474): unsure at all n locations
tatgtggatgacgtagtcgtcaagaccaagcagaaggatgacttgattactgatctagaagaaaccttagcgagcatccgcgctntcaagatgaaactaaatcctgaatagtgcatcttcggagtaccgttagggaagctgcttggatttatgatgtcccatagaggcatacaagccaacccggagaaaatcaacgccatcctcaacatgaaaccaccgatctcccaganagatgtctaaaagctgattggttgcatggcagcgctcagccggttcgtttcacgactcggtgagtgtgggatgtccttctccaagctcgtaaagaaaacagataatttccagtgtggacccgaagcatataatgcctttgtagacttcaagagacttctcaccactccaccagttgtggcctcaccacattcgcaagagccgctattgttgtacgtgtctgcaacttctcaggttgtgagcatg

SEQ ID NO: 78328 - DNA, 390 bp, Oryza sativa
agcttagtctcttgcttcataattaaaacaggtcttacagagctaatagtagcagacacaagcttacatttgtcaggctcaccaaggcctctaacattccaagataggatagagatagatcttgactgactagacataacaacttagataggcaccatatataaaggtggggggagggatcaagcaggaattacagcatgggaaaagcaaagcatccctgcacccgctaagagcatcagttgacagcatgagcagcatcagctagcaccttggagagctgatcgaaatcacgttcgcccagatcgcatgccgccgcaagatccataagagcagcatgggaggtgcgagtgttcacatctaacagtttgtacttagtcaccgccggagcgt

SEQ ID NO: 78329 - DNA, 465 bp, Oryza sativa
ctcaagctggctgtgtcaacaaggttagttgagccggcctctgtactgaccttgttgtctcgaaatgcctctctagcatccgatcgatcttggtgcacaggtcttgaatggtcttgtctaagttctccaccaccttgtccatgtcagtctcagccttcttggtctcgttgaaaggaaccgatgtcaccatggctgctgatgtaattgagggtacagatgaagctgtaatatcagggaacacgcgttctggtgcagcagcagtactcttggccactggccttgcggtggcgctacttggtaccatcgtcgaacaggtggtgtgcgtggcggtggcgccatctacagtgaacatctggacgtgctgcacatccagtaagcaacccacgtcgtatatgtcgcgaccgtgggtggcagaccgagccctctacgcgtcatggctggacatgaacgacacaagagccttga

SEQ ID NO: 78330 - DNA, 450 bp, Oryza sativa
agcttgttttatatatgaatagtacattgaaagcatcatagcgtatggctataaagtaagaaaaaatcgattaaaataagtattgtggcaaaacagtaagccataaatgcaaatgtgagaattaataagggtattgtactttttgtcgacataacaacaaaatgctacggaagttgctgatttttttaaaatttcagtttaaatttgagcctctgcatagtgcacactctactaaatcattgaatagacttaggctgataccgattcttaatttgaaaattactactagcaaagttcaacatgagccttgtactgctcattggttcctgatgagaagaccggaagagggaagctggcacacatatgacacactatactgtgttcaatacctcaacataaatggcttggcaaattaagatgtcaatatttttaattagttgtgcaagtgaa

SEQ ID NO: 78331 - DNA, 505 bp, Oryza sativa
  unsure (1)..(505): unsure at all n locations
ngaagttcctgtactgatttccccacaccggcaatcccncacacagccatctagttcatagagatatctcccaattntttgatggagatgcaaagctcctcccttaaattgtttcccaaatcactgccacatacctcagttgcagcacttatcttctgaataatgcaatcaaaaactgttgtcctgtcctcttcaaatgatttccaatggatcaggcatcggtagatgaggtatgcggcaataggccttgcaatagagaaacccatatcttcagatatgcactttatcaacaactcatggatattcagaanaatatagaaaaaaatgttgaggcacaacacctgaacgaattgtgatactgcttcanaagaagttcagaattactaagcatcatacctgttgctgcttctcagcttcangatcattcangcgtcagttgagaattgttctcctagaatgaacttaacttgtgttaaatcangaactcattntacgaatatactga

SEQ ID NO: 78332 - DNA, 449 bp, Oryza sativa
agcttttgtctatcgccgaaataaatagtttagcaaagagagaaaataactggtgttatgcgtcttgcagctattcttgggtgggaggggggttattaactaccactcttacatagtggcactcttgagataccactcttccaaatttcattacagaaatgccacatgagagaaagctaatatatataaattggcaattttatctaattaaagttaaaattactctttcgcccctatttttatatgatgaagtcaccacgagcgcctcgcggtcgaggagtacgtcgtccagaaatgtcacaaaagggaaagctactatatataaattgccaatttttttaattaaagttaaaattactcttttgcccctggttattatatgatgaagttaccatggacatctcgcggtcgaggagtacgtcatccagaaatgtcacataagagaaagc

SEQ ID NO: 78333 - DNA, 453 bp, Oryza sativa
  unsure (1)..(453): unsure at all n locations
tctattggccaacattattgctaatatcttgtctaagctgtgcattaagcttatgggtctgaagtcctccacccttgttgcttcaccctctttcggaattagacaaatgtttgctgaatttaggtcttccagtctatctgagttcagagagctgaaatggttaatggcctgtagcaaatctgatttaatcacctcccaagctttcttaaaaaaagcccctatatagctatctgggccaggtgctttttgtgggggaaggtttgatattgcttcttttaattcttcttctgtgaaatcttcctccacttccgacagatcaagggaagggagacttaattctgaccaattaagagttaaggagcgtgggacatactgccctaatctctgngagaaatatctctcaagttcagcctcctttngttctgtggttacagctatgcccgacggagtgat

SEQ ID NO: 78334 - DNA, 137 bp, Oryza sativa
  unsure (1)..(137): unsure at all n locations
agcttctatattgagtatgactgattgagctacagaggagggaatgaggctaagcgcattcccaacccaataactatgatggtgtccttagcattaaataagctngtcacctaggatgaaaaatgatgtggcaagtg

SEQ ID NO: 78335 - DNA, 484 bp, Oryza sativa
ctgaaacaagaaagaaccatgtcatacaaacaggatatcaagtgttagtccatggtacaagcctcaaaagttaacactccacaaaatgaggtagatgaagcatttttgtagttacattttcaccactctctgtattggaagcttgaccattctgatgtgcatctttctgggccacggcactagaattcaaagaaccatggatcccatcaaagctactccggttgtatctaccattattgagttcaccagcatcattcaaatcattggccatgctaccgccctcagaaatgttatccatgtcgttgtggccattatgaagtttttccacctctaacctcagtacacctttcactggtttgtgtacttttcttttgtggtcctacaagtggccaaaaaataaaataatcaattatctatctgttaacaatatgaactagctgtgcttagctgcttgtgcttacttggagggagtcctctatgtagc

SEQ ID NO: 78336 - DNA, 432 bp, Oryza sativa
  unsure (1)..(432): unsure at all n locations
tctgtcttagtctcatgtgaaaatanataaggccaatatataaatatatggccatcgacacttgtagagatcatcagtgatgctccagtgtgattgattcagagagataagtactgtcagtcggagtcggaggactnttagtttcagagctggtctcttgtccgaagaaaaaattccacaaatcctacctgtagttgatgaacactntgtagctaactactgctaattagtagtagcaatataagactactactgggtgagttaaactaactaatccacacatatatcatcatactagctacctcatgcatgtgcagcatgcttgatctgaaattctgaacttctgtctgaaccggccagattctggtttagaaaatagaatagaacccgcgcctctacattaaaacagatgtacaccaggttttcaatttc

SEQ ID NO: 78337 - DNA, 61 bp, Oryza sativa
aaacacgaaaacacacagcaacttcttaggcccagaagagggggagaagcaccacacaaaa

SEQ ID NO: 78338 - DNA, 420 bp, Oryza sativa
  unsure (1)..(420): unsure at all n locations
agcttcagtctattttcttctacccctccgcttcatattacaagactttatagtgtcaacattcatatagatgctaataattttatgcatatatatgaatgtggacaatgctataaagtcttataatataaaacggagaaattgacgtgcaattcttttgcgcgtcaaagcttcagctatggcagatgatcaagacttctanaacttggacttgaggagcctgatgatcttgacgtccacctggtagttctcggcgaggacggcgtctggtatctccgggtccgagccgaacagcgacggcgcgggtgtcacgacgccgggcagctggctggtgaacgccgtgatgacctgagcggcgacgtcatcgacgttgtactggaagtggatcatccctcgctggatgacgaaagatttccctct

SEQ ID NO: 78339 - DNA, 536 bp, Oryza sativa
  unsure (1)..(536): unsure at all n locations
gcttgccgtgaggatgatgattcactcagtgaaacagaagtaaactatgtatcttcttctcgagcattgcttgcgcctttcctaaggtcccttgtcttattgctcagtctaagcttgctacanagcctcttcacatcaagtacattcagcgctcgttccaacagttggcttgatcccctacggatccctaagttcaagttctgaacacgcacgaccaagaacgttttcagatgggagacgacgatggggacgaaatgcgctgcaaccttcaggatgatataaagcaccgcacgcaacacatatggctcatctattgcaattatacgcagagatcggtcccctggtgtgactggtctgaaatctccagtactgtctcgatgatcgacatcaaaatatgcaaatggatcgaagcctgcaatatacataatttacttcaagacatgctctgangcaacacagggcacccantaaaatctaatcatcaatagcatatctctggttagtcgatgggacaatggaatcgactctatacaatc

SEQ ID NO: 78340 - DNA, 446 bp, Oryza sativa
  unsure (1)..(446): unsure at all n locations
agcttataatataatagagtaataattagctcaaccattaaggcaggagaaatatatgacgctgagcacctatcaaaacattttggaatcagcccgaaaacatactccatgaacttcgccagaatctctagcatagtggcatgtagctttgcctttcactagctcgaccaccattactatactatacaagccgtcacgaacaatcaattgtcccgtccatacattagaagagaataatttctatcaacgagtcatcgacctcgaaacactaacattggcaattgtgtgagcacagatagatgctatcgatgatctaacctaaagcatcacttatactacactacctacagtgcagtccaattnttcaatgcagaccatcccacaggcagcagaagcatacttgaaccaggtttaaccagcaaagtatcatttgatggacttatctg

SEQ ID NO: 78341 - DNA, 475 bp, Oryza sativa
  unsure (1)..(475): unsure at all n locations
tcgccccagattcttctctcgtttcgtccggccgtggccaggaggacacatgtaaggtaaacaggttgctgcacgtacagattcaggctttcagctgttcctgtttcattttcgagaatacgcaggacggcgtatctctgtactcctacgtaccaaggtgtttctgtgttttggtggtgtttggatccaaaaactaaactttagtccatgtcacatcggattttagatactaatttggagtattgaacataaactacttacaaaactaattgcataaatgaaagctaattcgcgagaacaaatttntaaatctaatttatccataattagcatatgtttactgtagcatcacatacgctaattatagattaattatgttcaatagattcgtctcgcgaattagtccagcgttattanatgggtgttttattaatctaagtttactatttctaattagtgtctcaacatccgatat

SEQ ID NO: 78342 - DNA, 449 bp, Oryza sativa
  unsure (1)..(449): unsure at all n locations
agcttgtccattcttatattcaatatatggacaacaagggtgtgcataagttggtcagcacaaccaaaccaatcaggattccaatataattttcttttatctacatgaaanaatattctgctgcaaagacacttaagagaacttaatcacagttaagttgcaaaagaatcaagatcatcacatttctcttctccttgtcaccaaaaagtcaaaatttgtctgccacctatttcggcaatgttcatactcatctgcagcaatcaaactcagctctctccctaccagaagggacgaaagcnaaccagcccgtgtgtcgagctcttactcccactcccaccagaaggatggcgtgggtaaaggatatcatagtggacgcctgtgtacagcaaggtgacgcgaggaatgtaacgccatcggcagtgtagatatcttgagctggccattatgca

SEQ ID NO: 78343 - DNA, 495 bp, Oryza sativa
  unsure (1)..(495): unsure at all n locations
gcttccagcggtggtcggcgagctatcatgcggcggcggcggcagaagaagaaagaaggcaagtcttatcggcaagggaaggctaagcctttcttccaggtctccctctctccatctaaatccgtttntggaggaggaggagggggctatctcgttttagctaatctgttgtgtgtgttggtgatggtttcagttcagtttcagtttcatgtttgtgatcagtgagagtgatggtgtgtcactggtggtttagatcatgtgttaattagttctgtgggcgtgtctttgtgttggatcttgnggttgggttttcagaaaatactattgctgcggtgtgtgtgtgtgtgtgagtgagtgagtgaattaatgagtctctgaanattctggaataataagaatgtaagcagatgatgtatgtgcctcggcgctacttatatatgtgctctncgtttctgatattacagatacatgagacactatatattcatgctacta

SEQ ID NO: 78344 - DNA, 347 bp, Oryza sativa
  unsure (1)..(347): unsure at all n locations
agctntccccgttcttccacggtacttctcgccttatcctgcctcctttgtaccaagacgtccattgccagttaatgttcacaaaattcatgagaaaaggttagtgggtgctgatatggttgagcttcctgatgctgcggtcttctcccgatacactgctccagatttctctggtacatcagaaaatgctgttcaagataacaagaaagaagaatataccgagagcagtcctgccttcgagcaagaaagcaaatctcatactgtctcaagctccgccacgcgttcaccatcacaacagctagaatcaaatcaagatatagaaatcatgggcggggttgcggtggaat

SEQ ID NO: 78345 - DNA, 499 bp, Oryza sativa
  unsure (1)..(499): unsure at all n locations
cactcaagcttcttcttgacacncacttgcaccccacaggtttacacccatatggtcgctctgtcacctaccaagtcccgttagcgataatggaatccatttcactacggacagcctccttccagtagtctgcatcaggagatgcatatgcttctgaaattgacttatgagtgtcatccacgaggtacacagtgaaatcatcaccaaaagacttagccgtcctttgtctcttactccttcgaggagcttcactgacatactcctcagagacaagttcatgtgtatgttcagtttgttctggtggtgtgattgaactgcgaattatttcacagggttggttcgaaccactatgtgtatccttcattgtgaaaaagctctcacagaaggtagcatcacgagactccataattgtaccaacatgcatgtccggtacctcggattaactattaaaatctatatgaatgctttatgacatatccacaaaacacagtcccagtct

SEQ ID NO: 78346 - DNA, 428 bp, Oryza sativa
agctttttttatcttcagaaatccacgatcgacgaatatccggtaactgcgactatacgcaaacaatcgaaaacctaaccaaaagaccaaaagaaagaccctatttagactaattaatagtgccatagatctcaattttacggaattactggaaattgaacgggggcgatcggacgaatggatcgagatatatgaattctggaagtttaagtggaatttctgggcgaaggaagatatttgtggaacaaggggaaattgatttatgaaacttatagaaataatattctcaagaatattattgactaccacttacgtgcaggatcaacggaaatgacttatgtgaatttgaaataaggaattgatttatggaatatgggataaagggattattatatcccttggaaaagaaaaggatagagggatgtcat

SEQ ID NO: 78347 - DNA, 529 bp, Oryza sativa
  unsure (1)..(529): unsure at all n locations
tacggacctatgaaactcagcttgaggaaagaaccagataagtgtactgatagccatatccataatttcttggtccaacaatcacaagctccagatacttgaggtgcaggaatcttccatgcggctgaaatatgagtggatagaaaataccagcctcattcgcagacatcatgaacagagtttcaacgttcggtgcaactgttggaagctgcttgcgagcatattcaaacaaattaaaccaacggtagattgatatgtttacatgcttcagttgcagtgaatctccaagtgacaactgtattatgggcccttcatagtgaaaggtggagagattangagcatcactcactattatctgcagcatgttgcatcgtctgacccgcaagaaattaagcagctgcagtgtgcaaggtattttaaggcaagctatcttatggcaaaacccaagttccagatgctctagactaagagaattataaagaaagatccatagttcttctgtggtgatatgcaccaagctaaagtacac

SEQ ID NO: 78348 - DNA, 438 bp, Oryza sativa
  unsure (1)..(438): unsure at all n locations
agctttgcgattatntgatcacatagtaaacctttgtattaaagaggctatatattaaaacatttgattaatccatcttagggtatgtacaacggtctttattagtggactctctctattaccatgcaagtaaatttggttacatggaagaaagagaggaaaaaagaaaaacatgattgctacccatgacaacggctcttaatcgactcttagcatttattagacgaaattttgtttcatggggtgaaaaaagggaaaaagagtaagaaaaaattatttctatacattaatggttagagaccatattgtcttaactggtttaagaggtttacaaggtgggtgtttttaaatgctatctttctgaagactatgtgagaaagacgtatcaaacaattgtctgaattttcttaatagaatatcgatgatgagtgacttaac

SEQ ID NO: 78349 - DNA, 523 bp, Oryza sativa
  unsure (1)..(523): unsure at all n locations
ctcagcttgattgagacactttgtggtagcaattcacgtgatgcattgcattactttnttttttttactgatgaacacatagctctattgtgcttatattcttctctgttggagcaggccttctatgggtcttggatgtgctcatcaactgttttgatcagtgaaggggatgctgttagtgatggagttagaacaagacataaaggtaatgatcaagttaatcggtgttttccttgcattttcaatatacacaatttcattccctgcaattatattcacgttttaagattggttttctcatctactcctaatcattgaactttntttntatgaaactaacttggttttgtgctgcacattttctgttttttgcaatccacgaagctgttacatgttcaaaacaaaattatagatggtcctgtacaaatatgaatgcttggaattagtgaatatagtactgtaaaaattatgccacccagctaaattcagtgacaattgggaataattttgcatgcataatcta

SEQ ID NO: 78350 - DNA, 447 bp, Oryza sativa
agcttatctttatgtcaccagataaccttgttaacctggtagctaagaatttaatatgccaatgattcttatatgtttccattgaaacatacatatataaagcaaaattatatgtgtgtgtgagctaattggtgcatatactaggaatggaaaggaaacacattttgacgtggttttatagtttctagtacataataactccaaaaccctagtgtgattaaataagtatgtgcggctatagttggtacatacagggacctgaagttacatccactgtctaaaacaaatttaggaagggaagcttgaaaatattgtttcttcagcaaatgcaacataagaactatgcaaaaaatatttcaacatgatagaactcattgatattgcatactatattcattttttaaattataacataagttgttaccacaaataaagatggttctagtc

SEQ ID NO: 78351 - DNA, 485 bp, Oryza sativa
  unsure (1)..(485): unsure at all n locations
actaagcttgacaatggttacatctgccgatcattgaagaagtttactttgtgatggaactaaaccaaggctgacttttgtagacaaaaacatgagagccgattataaggttaagataatcgagctacttaaagagtatgttgattgctatgcatggaagtaccatgagatgccgggtcttatccgtgagcttgttgagcatcggcttccaattaaactgggttttatgccttagaaacaaccgcctcgtcgttctaatcctttactatatgaccgagtcaaagaagaaattgatcggttgttgaagacggtgtctattacgccatgtcattatgcggagtgggtttccagcataatcccggtgagaagaacgggagtggtaagattagagttgcatatattttagagatttaaatanagctactcccaaagatgagtatcctatgcctatagccgacatgatgattaatgatgcactcggtcat

SEQ ID NO: 78352 - DNA, 416 bp, Oryza sativa
  unsure (1)..(416): unsure at all n locations
agcttgttctattatttccgaaaaattagccttttatgattatattggtaataatccggccaaggggggattattcagagcacgctcaatggacaatggggatggaataactgttggatggttaggacatcctatctttagagataaagaagggcgcgaactttttgtacgccgtatgcctactctttttgaaacatttccggttgttttggtagatgaagagggaattgtgagagcggacgttccttttataagagcagaatccaaatatagtgttgaacaagtaggcgtaacggtggagttctatggtggcgaacttaatggagtaagttattctgatcctgctactgctaaaaatatgcgaggcgttcccaattacgggaaatattngaattagatcgggctactttgaaatc

SEQ ID NO: 78353 - DNA, 409 bp, Oryza sativa
  unsure (1)..(409): unsure at all n locations
ntatgttcggcgcagtactaatactggaacttatgagcaataattgctctatcaatcaccatctactttagacatatcttctgaaacttttttcaaatccaaaagtccagtatcttcctacaaattagtgaattaggaggagctctttgtgccgaanaagaaagagcagggcaatatttcaaacttgcattcgaactgcgaaatatttatacataggaggagagatcaagataatgcagcacggttggttatctaattggctagtcaaacatgaggtggttcatagatctttgggcttcgatcatcgaggaatagagactctgcaaataanagcagaggattgggattccattgctgtcattctatatgtatatggttacaattatttacgtttccaatgtgcttatga

SEQ ID NO: 78354 - DNA, 436 bp, Oryza sativa
  unsure (1)..(436): unsure at all n locations
atgcttattcttatggaaaaataaataaggccaataaataaatatatggccatcgacacttgtagagttcatcagtgatgctccagtgtgattgattcagagagataagtactgtcagtcggagtcggaggactttcagtttcagagctgttctcttgtccgaaagaaaaattccacaaatcctacctgtagttgatgaacactttgtagctaactactgctaattagtagtagcaataaaagactactactgggtgagttaaactaactaatccacacatatatcatcatactagctacctcatgcatgtgcagcatgcttgatctgaaattctgaacttctgtctgaaccggccagatttggttntagaaaatagattataacccgggcctctacattaaaacagatgtacaccaggttctcaatttcacaata

SEQ ID NO: 78355 - DNA, 428 bp, Oryza sativa
  unsure (1)..(428): unsure at all n locations
agcttcgctcttcttctgctgcgtcactggaacgatgggctgctccaacaccaatcgggatgtattccgcgaaatggacctagtatagattgcgctggcaaatgccacgggtttcctgcctcgctggagcaacaccccccgaactatctgtcggaatgcaacccagatgtttaggaaatcaaaagaagcacactgagttcatggacatggagatgattaatgtggaggaaccactgtgcaggaaaagatttgctagaagagtgagataatgggtaatgaaaactatcagcaggggaacttttgtatcaacatcagcgagagggaaggcgggggataatanngggttgaaatgggggtgctaattcctgctgttcgttgatttggctgcagaatgtcttgcttatatgatggatacagctaaacaagga

SEQ ID NO: 78356 - DNA, 393 bp, Oryza sativa
  unsure (1)..(393): unsure at all n locations
tactcagcttatttatacctaagcatcaagggcaaaagacatntgatccatttctttcagtaacatgatggaaaatgtaactgtaggggcatggaagggatcaaattgatatttcatgggtacagataggatcaggttaaatttatgggtatgaataggattgagtgagttttcaagggtacacagggaatttactctttggtttattttccatcagaccacataaccacatattccagttatgacgtcacttgtggaatctacaacaacttactgggcttagactcagtgatggacggtgtgcaccacatgctccgcggttgcaaacatttctaatactgaagtttacattaccacactgaggacaagttcagtcccactcccttacagaca

SEQ ID NO: 78357 - DNA, 449 bp, Oryza sativa
  unsure (1)..(449): unsure at all n locations
agctntaggatttggtgggttataattttatagtaagaggggattttacttctccccccttgtccatggccccattcctggcttcccccatacgccttcacccctgtcctctcctcttctcccaccctcacctcttcggatccgactactttgcctttagcgtaaaaggcaaaggtgcacagtaaaatatgtttgcgtttggaggtgaattgtgagaactttaccttctccaatgcaaaacggagtgatcaattaatatatgattaactaatcttttctgtattttttttaaaaaaatatatcatttaacagtttagaaagtatgcgtgtggaaaataagagagggaatagaagttggggaacagatgctaaaagaacacaccctaactcaatatttaaccagttagtgcgatatggttacatcggaaccggattccctgacatgaact

SEQ ID NO: 78358 - DNA, 421 bp, Oryza sativa
  unsure (1)..(421): unsure at all n locations
gctatctcattatatatataatnggttcggcctagcatcattgtcttatctaaataaaaaatgacagttatataattgttggtttttcttaaaaccgcgtagatgttctattatcaataccggtccatgataaaagctatttgctcccttttaagatataagtactttntggactcaaattntatatataatataagcatttttatgacactgaccctagcgctgggaatcaagcatttttcagctttcaattgcttatgaggggaattgccaagtaatttataaatcaaaattggaccaagtcaaaaggaaatatttgcaatatccttaactttattaaacaactaacaaatacttatatttatgagtgattaatttggattaatatgaattagtaaagataggatttacgattggttct

SEQ ID NO: 78359 - DNA, 497 bp, Oryza sativa
  unsure (1)..(497): unsure at all n locations
cgaattcagctcgtacccgcgatcctcagagtcacctgctgcatcaagcttctttatcctagtgcgctctgctcgctgtgcttgatcatggcggtctccatcctctgcatcagctgtcgatatgatgccgntgtactctgtcccgtctcctcttgctgcgatggattagtgcagtttcagtttcagtccagatttgatgtcataatcatggattggtagttgctataatgctggagaatttctccttttatagcagaaaatgttttcaagtcagaactacgtgaatcatgaacgcagtatgaaactatgaatttgtgtgatctgatgctgcagtgaatcaagaacgcaatatgcttcanatggttgccgttcatcacgacttggattgcattaatatatgctatgccgcaatacaaaaacaattcaatggttaactaacttgcagtggttagttttcctgatagaagtatgttttgatcaaacggtttacagtgaat

SEQ ID NO: 78360 - DNA, 463 bp, Oryza sativa
  unsure (1)..(463): unsure at all n locations
ggcggccgctgggcttgagcacgccgacgcgctnggtctccatgaggaaccccatgaagcagacgacgaacaccttggcgatgggcagcacggcgtacctgaacatgcccaacaccgactcccccgccgcgccgccgccgtcctgcgccgccgccaccaccatcttcagcaccgacctccccatcatcgccgcccccgcctccgacacgaaaccacaagcaaccggcgaaatcgaacaggattcctccccacctaaaaccgcgcgagctgaactgatcgaacagacgcggctgcgtcgcgacggccaagcagctgcccggggcggcgaacttgtagccaaaaatagcaaggaatcagttcccgaaacggccaactcctcctcccgacttgtacaaccactttcctcttccgtgtcaggatccaacccaatcactcaatcagcgtatgaatcggataccaactc

SEQ ID NO: 78361 - DNA, 418 bp, Oryza sativa
agcttttcttgttcttcctctccctttaccccttttcgccgcgctttcccgtgcctcctaccggtcgcgcgccgctcgccactagcgccgccgcttgccgccacctccggtcgcgcgccgcagccgctagagccgccgccgcgccaagccgccgccgccattagcattgccgccgcgtgagccacctcggccgccgctcgattttcgctaaaccccaccggagcccggttctcctcgcacgccggtgagctatccattctccttcgtctccggccaacaatggtggccgccagtggcactctctctactcctaatccttctcaacaccctccgtaggtgccggcgccacccgtccggccctcctcatctgcaggtcgtcagcgtcaccttcattctactgcccggacgccatactcgc

SEQ ID NO: 78362 - DNA, 516 bp, Oryza sativa
  unsure (1)..(516): unsure at all n locations
tactaagctttcctcggcttacatcgtaagcggcaagcgaatttgttgtatttgaatcatacactnngagttggagattggtattctacttcatcttctatatgcttaagtggatattccgatgctgattttgaaggttgtagaattgataggaaaagtactagtggaacatgtcattttattggtacatcattgattgcatggtcttctaggaaacaatctagtgttgctcaatcaactgctgaatctgaatatgttgctgctgctagttgttgttcacagattctttggcttttatctactttgaaagattatggtcttacttttgaaaaagtacctctcttttgtgataatactagtgctatcaatattgctaagaatcctgttcaacactcatgcacaaagcacattgatattcgtttccactttttgagggatcatgtngagaaaggagaatgtgaatacagtttttggcacgaagtgcanatgctgatatttactaaccntggatctaat

SEQ ID NO: 78363 - DNA, 411 bp, Oryza sativa
  unsure (1)..(411): unsure at all n locations
agctttaattataatcaattangatatacatggagtcttctctgataaatctagaggcatattataacagcagctataacattaagttacacacttggcatcatcaacattaaccatcaaagctaacaagaggccatcttcggttctcaggtgagttctcccaaaccacagatgcaaattacacgaaacttggcagaaatgatggtatacgagtcccttccaagctatccaaaaaaacagtccaaccggacactgtttgacccctcaaactgacattctaccaattgttgcgcaagctgtaactgcagtaactcgagctgacaaaccaccactcaaatccggtgctatattcaacccatccttatacaaatcgaccagattgaagtgctcaaagtgagaaacaaacttacc

SEQ ID NO: 78364 - DNA, 540 bp, Oryza sativa
  unsure (1)..(540): unsure at all n locations
ttacggacctatgaaactaagcttggaggaggaagccaccttataagggagagccacccttcctctattggactagtcttttagggagattaggccttttcctgaatgggtgtgcctatgaactgttggggtccgagcaaccttaggttatttgttaaaggggtgggaatgatgaggacatcctccactattacccgttgttaaaccttgctaagcttgggaggagaaagccaccttaaaagggagagccacccacaagtcataaatatttaacgtgtatgatatgatcgaactcaatggattttttaatgattaattcagaaaatggtatgaatagatttgttttgaaaagtgcccataatatcataaacttattctgatagtacaaantttatgtttacctttntaaagtttgtgttaaatcttttctaaacttcgaaatattaaagacaagagggaatactgttntattattatggccaaatcttccaaccccaatgttgctactaacaactggctctatcactttcgtggcacgta

SEQ ID NO: 78365 - DNA, 416 bp, Oryza sativa
  unsure (1)..(416): unsure at all n locations
agctatgatatacatactgtnttgctttcctgtgattaanaagcatgcaaaggacaatgcaagcccctaaagaggtgtacgtgattttcgacaggtgcaaaaggtgaacactgtatcagctcgcagagccttcaaagggtgctgatcctactcatgaggtgaccaaatcagctggatacaaatgaaatctcaatacagaagacaaatgcttctcccatagatacaaattccaaaacaaataacaccaaccatgacaggagaggccgagagggaacagttagtgaccaataggagtgagaaatgctcatgggtcttccggctagctccacaaggtggtgggctagacgacctgagttcatagcctcacctcttctaattattcgatattatgtgcatccctaatatatcgagttttt

SEQ ID NO: 78366 - DNA, 378 bp, Oryza sativa
tatgtgcgaattacaagctgaatatattttgggtgcggtaagctaatataaacgggttcgacgaccgcccttctagagtgaaaagaatgtactgagcagtacaagtttctgggcactgtagtcgtgcctctgaccaaacggcccttctagaagccgtacaaagaccaacaaaatcctcgcaagacgaggcccccaaccgcagtcccaggtagacctgacgaaattcaccctgattctccccctttcctccccttttctattgctaacatcacaaacccctgtactacttcgcatcgcaccagacgatgattccggtccacgcgacacagagccctcaatggcctcaaaaccgtaacaccaccactataaaaatcaagt

SEQ ID NO: 78367 - DNA, 493 bp, Oryza sativa
  unsure (1)..(493): unsure at all n locations
tcagcgtctggttcttgatgttcatatagatgtgttcttggatgttgttgatgttcatgtgttctttgatctggtcggggtgaaggggagatgctcgatgcatcagctcgattcgagttgatgcacgagccactttctttttggattcttgagacctcaaaggtgccggttctagaactggcccctttgatttctctcagcagtgtcgccttctccaaccgacacctatgtggggtttccaaccagcatctatttgtgtttatgtagtagtgatttcaatatatatcttcatcatnttttntacaatatcatacctatatagttcatcatcacttaattaatgttatttctttcttatctcatcaagccatatcaccttaattatttttggctctaaataattaatctatggtccgaatctttttctctctcataangacacaccatcttatnttttatanttggatcatcatgctagttaaagtctcgtaac

SEQ ID NO: 78368 - DNA, 386 bp, Oryza sativa
tctatcttctcgttcttgcattaccaggaacccggtttggctccaaccgaccccgccccggtgttcccaactattggcatgcgaggtttccctgaaccgactagatacttagccatggtgtcccattccaccttgtggttgcactttgaatatgttcgatgagattcccacaggaactcggccttatatgcgaatactggacagtgccacatatgcacaacccccgcatcgcgagttttcacaattcattttatattcaaacacaccgacaccacatgtcgggttttgaaggcttcacatacccatttcccaagatatctacaaacaacggcgtatgtgggatatttggtatacgcgctcagagagcacgaataccgaggtaccac

SEQ ID NO: 78369 - DNA, 444 bp, Oryza sativa
  unsure (1)..(444): unsure at all n locations
tactcaagcttgtagatgctctttcaactctctttcttcatgttctatttcattgatttccacatccctcccgctgtggggtgagctactcacactggtgttgtttggagcattggcgaggaagcgatttgccacagagctgacagatgggtagccaaatgagaaaatcccgccattggcattgggagagacaaaaacaacagcaactcatcacgccacagaggatagcgagctcattggccttgttgaagatggtagtgtggcgcttggaaaagcatgcatctcgtaccttcttgtccccgcgcttgatctcaatctttttcctagtcgtgcgtgccctacacttcaccatctcctagctggtgactagcacagcttgcctatgtatcagcgaaagaatggtgtgcacngattgtacatgatgagcactgagctgatgttaca

SEQ ID NO: 78370 - DNA, 389 bp, Oryza sativa
  unsure (1)..(389): unsure at all n locations
ncaagctttcattatattataatttcgatccttcattggactggcctagcccaacaagacccaaaccctaatccttttaaactctataagtttaaattagttcccttaacttgttcctttttcctttcaaaaaagtacaccgaaggtcccttaacttgtcattgagctacaaaattgtcccccagtcgtaaaactagattatttgacatccctaacgtacaaaaccattcactntaagttcttcggtggttataacaccgatttcgtccgacttggccgctgagtcagcataggacccacgtgggccccacatgtcatgatgtcacgtcaacaccctttctcttccacttctatactttctcctctcctcctctactctcttctctatc

SEQ ID NO: 78371 - DNA, 486 bp, Oryza sativa
  unsure (1)..(486): unsure at all n locations
ctaagctgtggctcttctctggctacaggttggcgttgcaattgttgttatatatgcnttgtcaaggagagccttttcagttacaccggatggtcctgaaatgctgttacttgattatcccagtcaccagcgacgccttctaccactgctagcaaaagcgtaacctactagctttctctggaattttgtactttgcatgtatttaattntgaagctttttccacagcttggagtttttgcagtagctcattcgttatttttcctcttgctaatctatcatcttgctgaacatttggcatgggagtagatctgatattctagtcatgaaatgccagtatccttataaaaaaatattagcactaaagttgctaatattcccaacatgtaaaaanacatcactaatgctaagcccttttttcagtgtttcactactacttaatgcatcatatatgctaaagtatatntccttatgcagatgtctgatga

SEQ ID NO: 78372 - DNA, 436 bp, Oryza sativa
agcttacactatcatttatggctgtagaatatgaaaatctttgacggtaggaggagcctatgattgcagaaatggttgcaagcagaaaaaaaaaactactatgtgattgctgttgctctatttgttgcctttttgtgctttaaacttccatggatgatcaatccgcgttgtgtaattggtctcccatgatatgttggttagtcacggaagtaccatatagggaattttgctaccctctggccaaatgggtttcagctttttcagtaattatgcttatgttgttgacttgctacaggtgttggtggctactcttacttgcttgaaccattgtggtgggcacgaatgacagcaagtaagtggtttcttcatgcatgaatatactggttgacaacagttcttcatctgtggtgatagtgctaattgatgtactatgctt

SEQ ID NO: 78373 - DNA, 242 bp, Oryza sativa
agcttctttattttttgatttccttaaccgaatatagtaggaatccgactattggcgacttgataactcccatcggctgattccgagatgctgcagccgatatgattctaagccgatgatgtctttgccgattaccaaatttcactgttaacaccttgcaacgggaggagggagagggggatacggcttcttctctacttctctttggcgctaaatattcgtattacttatcttatcctctg

SEQ ID NO: 78374 - DNA, 518 bp, Oryza sativa
  unsure (1)..(518): unsure at all n locations
ctcctgcaaccactgcaccaatggaagaatctttcttgcatattgtatcttatctccggctatttctggtcacacagatagatacaaactgaagaaagcatgagttcatgctgctcctaaccaccagaatggatgatgatcaactaanaaaaaaggggaaaaaccaaaataacaagttgaggttgaacctggtttgctctatctttgtcagtttgccttgatgacgaaaaccagcatcatcatctgtatataaaagtcaaaagggcatgtcactcttaaattaaagtagggaatacaagctgaagtttactactgattaaagaagagtaaattatttgcacttgcaagagaaggaaggcttaagaagaagggattcatatcatgtatactttcctatgatacaaacctgaccatatacaatatcatactatgaaaataagatcagctatcagagccaagaaattagttggtccaataacttttcaggccccaataanatagttcttgttgagaaatgg

SEQ ID NO: 78375 - DNA, 456 bp, Oryza sativa
  unsure (1)..(456): unsure at all n locations
agctntgcaatgttataaatgctaaagcaaatctagtcacacccggccttatggtatctctcttcttcgtgtgcttcctcatcaaggccaatgtcttgtgatgtgaatagactttgcatggtataatgtggccaatatgttctttgatcctgcattttgtgaccacataataagcattggaccctatctttgtttgattcattgaatgttttgcctcattcccatcccatgtcattggagttcctctaatgaggatagggtacttctgttaccccagtaacactggtggttgatgagacaatttgcatatacaggaggaccaaaattagtaaattattgaacatctaaatctgagattatatcaatttcatcacacaattgactgattgagacactntctgaggttgtacgatgcatatcttgatttcatgccacagatgacagatcactaaatac

SEQ ID NO: 78376 - DNA, 457 bp, Oryza sativa
  unsure (1)..(457): unsure at all n locations
actaagctactgagaggtgacggagggcatgttgatggcattctttgattattcaggtcttcatgattgactatggtttcttcttgcccatgtagatatgaaatatttatcactgaaatacgcgcattcttctacttatatttgccttcgattatgcgttgtacttattctgaacacaagtgtggcattcaaactgcccgttggcatgccactaatgtttattcccctctgtgtcaactgtgaagagatcttttgatcgcgttggacacaagcgtgatgggcatatttgtagagcttaagaaagaagcacatgtttgtcattcccaatttcacgtgttgctcatttntaccaatgtttactaatggctntcatgaatgtaattcacatttctaggagttgctgtcagacctggagagacagtgatgtgtgatccaccaggagaaatctattatcata

SEQ ID NO: 78377 - DNA, 404 bp, Oryza sativa
  unsure (1)..(404): unsure at all n locations
agcttatttgttatatttatcctgaattggcaattagtgtggttccacaattttntgccgtttcacacaatgacgcgtgatgtggtttaataagtgtgcatgcatctcttgattgacttggttctttgatcttgggatgaaagggacaaatgactgacacggtagtgatgagtttggcagtccaatatacattttaacagcaaatctgttaatgttaatgtttcaatttctcatcaaatgttcataatttacctgactagatggatggtaagtacttgataatattccatccttttgattgtgcggactaagtactatacatctgatcgttctgaacgtgcgttcattcgttaagttataattggntctggatgcatggttagtgaatntggagctgatggtgg

SEQ ID NO: 78378 - DNA, 399 bp, Oryza sativa
  unsure (1)..(399): unsure at all n locations
accacatgttcatgttcatccatctattttcgtgtggtttagctttccagccatctgtatgtttttcctctacagtaggccatataaatgctttgcctctttacatgagtttaaaaaacggtgtaattatgaacttcatattttgatgactagttaccatgattcttgaaactttatgctattgatacagattttttattcatagaaaattgagcatttgcttgtttaatacgagaagaggtatatcacaatagcttcagatttctggtcaactggagtagcttctgtcattggtagtcaatgggctgcctgatactattagttttactttatatctggattatctagtaactngacatttgtttgtacttgatattcattacaactggtcgaacaact

SEQ ID NO: 78379 - DNA, 357 bp, Oryza sativa
cgaagccaaagacctagggcacgcgacatctgctaaaggagctgctatggaccccgacacagtgaccgccgccactgatgggaagcaacccaagacacgcacccaggttcgcagctcacaggcggcggcacgagactaccggaggttcatcgagaactgctccaaaatcgctcgacccacgacacagtagcggaagaaagaagaaaaatctgtgcggagcctgcaatgcgagaacgcagtccaaacactcaaggaaaagctggggccctcgccagctataacctgaccggatactcgcaaggacagcacggtgcactgagacgctacgcgccaagacagggagcgcgctcaagccga

SEQ ID NO: 78380 - DNA, 455 bp, Oryza sativa
  unsure (1)..(455): unsure at all n locations
tgcacgatgggagcactactcagcagccatcaggtgttctagtttaccaccctcgatccatctctaatgccaactntagtgattcccggtgaattggtacctcaagcaggttgcagtatcagtggaatcgagcaactcgaattggtcgaatcgaggggtgaatgttgaatcgccaataatctcgtgtgcatcaagcatgtccttgtccgtttcgtgtacagacaatgtgccaatcgattctatgattaataagatgcacgatgcaagggtaagttacggttagggatatatttgggggttgtttaattatggtaaacctgagtacgttttggttgaaatagattgatttgtgtgtatttgggtggctaagcaatggaatatcgtccatattgagtgcacgagtatgaagtcgaccagttgccagagtacaaacatgaccccgattatcatgatac

SEQ ID NO: 78381 - DNA, 454 bp, Oryza sativa
  unsure (1)..(454): unsure at all n locations
agctttacctctagttgaagattgaaatcgatgcagctcaacccgaaagtaagaacaactcgtcgaaataaacgaaagtaaaaagggtgacgatgcaccgagattgtattgaacgactgttaattgattacatgggttcgggttctatttatatccgagatgcaagatatgtcattgccggacatgatatttatctctaacaaactctaagataccataaatcttcgtggcagactttttcccaaacatatctctaaggaaatataatgaaatatcctaatttaatagatacaattgcctatccaagagatttatctctatcgcggcaatccacgtgaagcacctttatcgattctaaaagcatttntgaaatcatcatcatcggaatcggctgcatcacctctattggctgtcctctgtccgatccatctcagccgatgcatactctgttctt

SEQ ID NO: 78382 - DNA, 500 bp, Oryza sativa
  unsure (1)..(500): unsure at all n locations
cttaccggattatgagccctataccactgtgggacctccaccgtgtcgtgcgaatctcaccgggaagcggcatcgttgtcctgtagccgcacgggtattttttttaagagaaggatatttttacttggcctctacatctaaccgggtacatgcaatcatttaaattggaaacttagccccgtaaaacaacccaatctaaattgagaacctccactgtgccgtgcgagtctcaccaggaagcggcattcgctgccccatagccgcacatgcatttttgttagagaagggtaattnttacccggcctctacatccatccagatacatgcagccatttaaattggaaacttagtcccgtaaacagtccaatcaaaaattggctcatatggaaatttgaactcacgaccttaaagtgctactcaggtcactgtaaccactaaacaacatgcccttacacataanaacatgtcttagatcttcaaaaanatttcataacatttaa

SEQ ID NO: 78383 - DNA, 454 bp, Oryza sativa
  unsure (1)..(454): unsure at all n locations
aagctttcgtcttctggcgacgaacacgccgtgctgcagcagctagcgcgcgctagagccacaggttgaaccgaccgacggacatcagccgcacctcgagctccaccagccgagcgcagaccgtagcacccacacatccgcatccggcatccgcattgtctctatcggaccgcagggcacgccacgttctcccggttgatccacgcctgtggtctcgccggcgacaccgccagccacgcgcgcgatccctctcctcgctctgcaccatctccacctccctcgtaagcacccacaaacccacgaacactaactacaaggagctgcaaaaccgagcagtgatttaccatcgacgatgccgtcatgcatgggagcaaacagaccctgcggggcacgggcggcggtgatatgatgaagccggccggcanataccgaatcgacaacgagagcacaccaa

SEQ ID NO: 78384 - DNA, 451 bp, Oryza sativa
  unsure (1)..(451): unsure at all n locations
cttgtgccgtgctcaacccatctgcattgcagtattgtatatctttgtccgtgctcaacccatctgcattgcagtattgngtttgaaatgctaccgctagagaagctattatgaggtgctgcagaagctgtttttgtcatcttagagatgttatatatctatggatggttgcgagttggttgaatcttgtctagacgatcataagccgaggttagctaatggtttcttaaacttgcaacacagtttttctggctgtaattcttgtgcgccgcggcaggtaatgagttaaaacctatcgaggtacatttgttggacttggtggagatctgagttccccgtgaccttttccaatctggtgaaaccattgctgtgttcacgaacaatgatcgttagcggtcaacaactggttcatagctcattgctttgctattagattctctgctgctacctg

SEQ ID NO: 78385 - DNA, 431 bp, Oryza sativa
  unsure (1)..(431): unsure at all n locations
agcttaaagttctgaatcccttntgtgcatatctggatctggatcctgcagaacaaacatataggatgagtagtatctgatataaatataatactcaaggaaaattcaaacattttaaaatgtttgtgaatatgtatttctcctcttgtcaattttgattttcccgagcagatgactcattacgtttaaacgctctgttcgactaatcatagcccccaagcatcgggagtcggcctaggcacttcccaaacatgcatatgagtgacatgagtttgtcaataatggaacanagtttcacgaatctgaatttactactcacgtacttttgcaattgttaagagaagaaanataaattatcttatctctatgcttttgaattattccgaagaatacttagcaccttgcgttactcggtccatccaacgagcccc

SEQ ID NO: 78386 - DNA, 370 bp, Oryza sativa
atactccctccgactcagaatgtatgatgtgttgaattgttctaaatatttgatcatttgttttattcaaaataaatatataaatactatttatttggttctgacatcgctctatcatcatagaaaatataaccttaacttttagttttatatatatatactacattgtatatattctgggataaaaaattaacggtctcgtacattgtgctatccataatccaaaaactatgaagtagttctatacttgccatatcatatagacactgtgtagaaactatgtattcaatggacggtggtacaattaaattctcatccaatcacctctcttctctctccgtttatatatctatccccttattattctcat

SEQ ID NO: 78387 - DNA, 441 bp, Oryza sativa
  unsure (1)..(441): unsure at all n locations
agcttatttatttctcttcatttctatcacaataagatggactttacccaggatgagaatggatcagttattaaatcttggatggaaatttcttttacctatttccctgngcaatctcttattaacaacttcttcccaacttgtttcactataaaataagataatacaataacagtaagaatattttcaacacaaaagtcctctcaaacaagagaaagaaacatacctttttcatagatatttcgaatatgttccctatggtaactgggttcatgagttatggtcaacaaacaatacgcgcagcaaggtacattggtcaaagtttcataattaccttatcccacacaaatcgtttacctataacgattcactacccctatgaaaaatcaattacatcggagcgtntccgggggcgaatccactttgaaattgatatatgta

SEQ ID NO: 78388 - DNA, 456 bp, Oryza sativa
agcttgttgttgttgtgtggtgtcaaggcgggtaatcagggagagaggacaaagaaaggggcaaggggttcagtgttttgcagcttccaccaccattgcagtgagtgaatgaagtgaccatggtgctatagggggctattgctagggcactctactactacctccaccaacaacaacccaagtggaggacataaaaaaattattaacaagagaaaagaaacttggagctcacatgtacttatggttatggaggagcttattagctagacatagatctatagagagagagagtaacttagagagagagagagtaaacttatagaggatgaagaagaaagcaagctaagtatgggatactgatagtctgaagctcagccaaggctatagcaagaaggatgagagatgagatgagatgatgttctgagcttatatttctcagagcttgcatcttgcatg

SEQ ID NO: 78389 - DNA, 486 bp, Oryza sativa
  unsure (1)..(486): unsure at all n locations
actcagctttggctggagatccnaacattggagtgtatgagaatggctttgtttgctaaagataatcgaggcatgttgttaatatattgatggcaaacaaattgtgttgtgatagtaccattcatatctgaacaagtgttaattttgtcaattgtgtgaactcattttatttttctagtgcttgtttgaacacaattaatcatgatgactcaatttttatactgcatgttgaacacaattaattttgtgaacctatattcttattatactacaactgaatactatcaattgtgtgaatgcattctcagtttgtactgcatttgaccactatctattgtgtggacccatttatttttctagttcttgtttgaacacaataattatgtgaactcatttctttatactgcgtgttgaacacaattaattttgtgaaccatttttctttatactacacatgatactatcaatgcggaatgcatctcttta

SEQ ID NO: 78390 - DNA, 404 bp, Oryza sativa
  unsure (1)..(404): unsure at all n locations
agcttgtctgtcttatcttcgtntgatgaagtcactgcggctttcccattttcagattcagtctctttttcttctctcttgtcagatacagccactgtttcttccctcttcccagatacagagtctatttctgccctctcagattcactctctgtttcttccctgttttcagattcagtatctggttcttccctcttttcagatgcagtctcttcactcttcaaacctgaactaccttcttgtgccatgtccttgttcaccatcacatatggctctgaagcaagagcagaattttcaggactccagaacaatggcatcttgatgtcatcttctctcatccttgcagcataatcatttatgttaaaagtagcctgggttttgccaccaaatgcagattctaattc

SEQ ID NO: 78391 - DNA, 465 bp, Oryza sativa
  unsure (1)..(465): unsure at all n locations
gatgaacgtggagctccatgcgatagctttctctatgatatgaatgatgnctgttctattgttgaggagttaatgttgctagcaaatatgtcagctgcagaagttatatccaatgcattcccaaattgtgcgttacttcgtaggcaccctgaaccgaatttacggaagtccagagagtttgaggcatcttgtgctaggaatggttatgaattggatggttcatcatctggtcaacttcacctttcactttctataatgaaggaaaagttaaaggatgatcctgctttgtttgatattctcatggtttatgcttcaaagcaaatgcagtcagcataatacttttgcacagcagatctgataagcaagagggatgattgggctcacttatgcgtatctgtccctctatatacacatttcacatcaccacttcgaagatatactgatataattgttcacagaacactg

SEQ ID NO: 78392 - DNA, 447 bp, Oryza sativa
  unsure (1)..(447): unsure at all n locations
agctntccttgtggttattctggtcaaaatactagcataatctacagggtcaagttgctcctttatgccaagctctaagaacaggtccttgaatactgctaaatcaattggaatcacgcgaatgtaaggtgccagatgaaggtgtccagttaaaactacttcatcagtttttgcaaatccatcccccacccatatccatctacagccttcaagtaccaccttcactatatccatttcatcagatccaatcaaattactcagtagcgaataaatcttatgcatcaccaacgctaactcttgccggagtacttgatcagtcacaatttcattggttttacccagctcaagcaattgagctgcaattacacttccagatggaggagacaaccaacctaagctatacgacaaggctgacgaagtgcattcaccatcaagtatgcgtgagct

SEQ ID NO: 78393 - DNA, 469 bp, Oryza sativa
  unsure (1)..(469): unsure at all n locations
agtgtggaagctgttgatgagatgtgcggttgctgtgccactcgggtatatgagcttgtaatcgatgatcattatctgacagagaanaattaacatcatggttcaattaatttaactatgtccttcaaagaaatcatatatctctgaattttatgagaaactgtaacagctgagctgatgaaatgtactaagtaccttcctgagtggcacaactgagaagaggcccacgaagctgacaatgaagaggaatccaatcattcagcccaagctggggttcttgatgttgtgctcgtccctggcctcgcctgactggtcgctgatcctgtcgctcatcgcgaatatgtagctgccacaaccccctgtaccaccagtgcatagatcagcatctgaaaccatcaccaccctgacaccaagcagagaacgtaatgcacagtgctctctgtggatgtactactgataacacggagag

SEQ ID NO: 78394 - DNA, 416 bp, Oryza sativa
  unsure (1)..(416): unsure at all n locations
agcttgctggttggtctgctggatcgatcaagctagctaggctaggctaaggcttgaattcttcattacttctgtggccgcaagctagctagggcatgcattcatgaattggatgtcgtggatgcttgtttggctaatcgatcaatggacaacggttgagtaatttctgctgcagaaacccatacttgattccatgctgcttgttgctgcatgacaagataactaagggaatatttcccttgtcctagccttgaggaaactgatggcattggatcccaatgctntatttggcctgcaatgcacgcacattatatttaattctctttacttctttctttcaaggaatgatattcctttgattacttctctctttggagcactgtcatccggctctttacttctttaatttttatcct

SEQ ID NO: 78395 - DNA, 351 bp, Oryza sativa
  unsure (1)..(351): unsure at all n locations
tcatctaagtaagtgcttctcaacgacacggatgagaaagtgcgtctcatccggtcggagcagtgaaaattgtatcgattgattcttgtcggcacgagaggctccctgccaatcgtttaccgaccctgctgctccaacagccacactcgagaggctccctgccaatcgcttaccacaccggctgcaccaacagccactaaccaagcacgtctgaacgagtggctccctgccaatctgttaccgacaccggctgctccaacagccttaaaccaagcacagaagggaaaacctttcacaccaacaacagtttacaaagtggtcattaanactatgctaatgaatcacctcaca

SEQ ID NO: 78396 - DNA, 451 bp, Oryza sativa
  unsure (1)..(451): unsure at all n locations
agctttacttctatgacacatggtgacgtctttctaggtgtcccggtgctaaccgcgtgtagaaagtggcaatatggtcactttggctggcgtccactatggaaagtcggaactgcttggttgttattgcaatgagcttgaccattataatgcatttgtatttattggcggcaagcccagcaacaatgacacacgttctttgtaaagttggagctgatgtgtcactattgccacaagcccggcattatcataatgttgtacattgggctctatcgttactcgttacttagttgtttgtgggttagtgttgaatgttgatgtatgacctgtgcttgtcggccgntctaaccacaaaggttatagtttcgactagatctaaagcagtgaaagaattaatctttctcatcaccacaataagccacatcactcaaatattacaaccgttggatca

SEQ ID NO: 78397 - DNA, 411 bp, Oryza sativa
  unsure (1)..(411): unsure at all n locations
tcattcgggtctaaggagacacatgctcagtttatatatgtttggatagctttcacctcctggacatttatttgtccattnttttaactagtccctacgatcctattcacaggtgcatgtctatcatatcccctttggtcagtaaaatatactaccctctccattctttctgtttctatctttttcacactttaagttcacaaaataaaataataataataataataataataataataataataattattattattattattattattattattattattattattattattattagtagtagtagtagtactactatactactactactacagcaggccacacgtggtccgccaccgccacccncatgcctcctctccgccggatctgcaaggggagggaggggagggg

SEQ ID NO: 78398 - DNA, 394 bp, Oryza sativa
agcttgatgttattcttcaacactcaggttaatggcatgacttagaagagcatgaacgcctcgagaactgagaccaggtagaaccccatgcctctagccaagaagcaccgtcatcttagagcttgtcaagaaaccaaaaaagggagaaccaggaagaagaagactaagaaactaaagaccctgaactgacataatctatctacgaagactaagttgtaagtagctactaacttgagatacctagagagagatatatatatctcggaccatgaagcctcaataacccacaaggtcacaccatctgcatgttcctcctccttatgctcagctgatggagcaagcagagagcttagctagcattgtgagccaagcggacactcatcgcagcctatct

SEQ ID NO: 78399 - DNA, 438 bp, Oryza sativa
  unsure (1)..(438): unsure at all n locations
tctntccatagtagttaaccaagaattgatacactgtattctctttccagtccacagctccatcggtgaccttgcttgagcggtagcaagatgggcagagctgatttggaggccaggtaaccttcggaaacaagggatcaccagttcccatatcctnttcttctttcatcaatctcatattgactttgttatgtgtgctccataaccagagactgagctcacgagcagttctgaagggggctgacacgctacaggtaaatggctacagtcacgcatgtcgtanatatattctttgaatgatggtacaacacaaagttagttntccaaaccttgaacacatttcataaaagtgcttgcggcattcctcacagatgaagaagttgtgaataaaatcacatattgatgtanagggtgactggctctctccatccccaattc

SEQ ID NO: 78400 - DNA, 449 bp, Oryza sativa
agctttgatttacttaataataacattgtctaacagcaggagtaacaaaaagctctttgccctgatctatgctcaatgtttatcctgagattccagcacatcagaatctgtacctaaactaaggtatcttgtaaatcccctgtttgagtacaaccagtcatccatcacatccatgtttatctcctcaggtttaattggtttaagggtagaaaatggtgatgcactatcatcagatcgaatgtcatctacacataaaggtagacctgactcgcttagcatgctgcttaacttagcctccatattgatatcctggacgttattgtaacatgtacagataagaatcttgcccatctttctccatcctctactcatagcacatttaattctccacgcaaccttgttgatagaacgtagagcctatattagcattctaagaaaaaagaagtgta

SEQ ID NO: 78401 - DNA, 433 bp, Oryza sativa
  unsure (1)..(433): unsure at all n locations
ngctattttcacccgatcgtactccatccaagcatgtttgttctgttggtcggatcaggttgcgttatcggcccgccacttgaagtaactctgactgtgtcaatccattgtacgaattgacattttcttacatcctcctatgtacatccattttgggatagttaagataatgatagtactgaggagtgatgaaaagaatagttgttattaccacganatcatcgtcgacaatatttggacacacgaaacacctttgtcctcgagttcggtgccttacggaccttatgacctgacaacggtcaccacaacgacacttcggacgctcacgccacgtggtgagtcctatgggagttacgtgccattctaatgctcagcagcaattcgacgttcatgctcattctttcaccttacgttgtccgatcttgttttacta

SEQ ID NO: 78402 - DNA, 415 bp, Oryza sativa
  unsure (1)..(415): unsure at all n locations
agctttatttttgtntctttcatattgcagcgttaccatctacagtgatcaacttgtaacaaaaagccactgccatttcttgaaattcagcccattctttctcttgcttcttccactggactgggggtcctgatataatcaagtaaccatctggcctaagtagacagtcgacttcaatcaaatagctcccatctgccagtatatacaagtaagagacagcattctcacgaaccatatcaaacactgaagaaatggtttacttactgtangccataaatagtatcaaacaccgtgagcaatgaacgaactcaaaagactgtgcaggaaatgtgaagcgcctcgtgcccatcatcacaagatatgcacgaactcctctctccagagcaactgtatttgagaattatgtgaatctctt

SEQ ID NO: 78403 - DNA, 494 bp, Oryza sativa
  unsure (1)..(494): unsure at all n locations
tgtatcgggcgcttatggagtggtggtggaaactctgctgtttacagtcgttggcccaccaccagagcccgtgtcgtcatcgtcagagtccatcaaccaaagccgtgggttttcccttgactccccgtacacgcaggccgtaaccgcgacctcatatttatgggaaagaccatcacgcaggtccgacgccacatcatcttatgtagatgccaacacatctgatggcgcatctacccaaagagaggtgatgatgatgctgcaaggtangaggacaatgacgcacacaacggttacccgcatacatatggggcccacgtgggccccactcaccacatcagccaaaaccggctactatagtaccaactttcgagggatcaaagttgacattgtattgtgaatangggataagtatacctgtatttagttgtggatgaatctagacttgtgataattgcagactaagtgacaatgtcttgttctctacctcttcccct

SEQ ID NO: 78404 - DNA, 439 bp, Oryza sativa
  unsure (1)..(439): unsure at all n locations
agcttgagtatttgaatgtgaatatccatcccgttttcaaaactaaacggtagtgatggactgatggtaacatgttcttgtatgattcattatgcataccatctgtagcattttgatggtaagtctttgtgttgattcagcagtataccatttgtagcattttgatgttggaataggctgattcagcagcatgtagtttgaaaagggattcaacagaagtttgtagtgggagtttctactaacaagacagctctagttaggcgtggcttgtaatatgttttctacttgtatttaatcagaaagcaacatgtagctgtttgtcaccactcttgcttgaaggctgttgaaaaatcccaaccgaccattgtgattgtgtggaatactacaacgttgaatntgtaggagtttnttttgtgtgatttgctntcactatcttaag

SEQ ID NO: 78405 - DNA, 458 bp, Oryza sativa
  unsure (1)..(458): unsure at all n locations
tatatntaanatctgctctgaggcgttttatggaacatcatattattgaaagaatttaagaggtttgcattcctctagaaattttccgtatagacttgtttgagacaaaggaaagatgttgaattaataaatgcatcaagaaaaaaaaaatctcacagctctttaactgtatggcgcataataatcgttggacagctgactatggcaaaataaccggaactggttcgacacaacttttcatgggcctctgggcgcaccgctcacacatgccgatacaacttcccatggtccatcgagaaccgcgagcgcctcaacttcccctgngccttcccgccgtttcgtttccgttctgctctcactgacaaagtggcccacaccgcagcaggccccacctgccattgtcgtgcggagaccgtgtcctggacgaactggagaggcagccgccacacggccacacg

SEQ ID NO: 78406 - DNA, 452 bp, Oryza sativa
  unsure (1)..(452): unsure at all n locations
agctttctgcttgtgaatttgaacctttagagggtaccatcttcatcttttctttggcatgcaaagcatcataaactttnttcaaagttagagtatcacggcaataaagaatagtatccctgaagtttgcatatgagctaggcaatgaacacaataaaataaggcctaaatcctcttcatcatactttacctccatagactcaaggtcagcaacactttccttgaaagtggagagatgatccatcacggactcatcatcttgcaagttgtgcaaaaataacttttgcttcaagtgcatctcactggtcagatccttggtcatgcatatctgttccagcttcaaccacagcccaacggctgtctccttcttaagcatctcctgcanaacattgttagatagttgacgatgaatatatgacatagccttacgatcccttttcttctcattgacg

SEQ ID NO: 78407 - DNA, 476 bp, Oryza sativa
  unsure (1)..(476): unsure at all n locations
ctaagcttccatataataacaaggcgtataactgaagtcttctttataacatctacanatagatcttagcagcaggtaaatcatcaagttatatacttggcatcatcaacatcaaccataacaacaaaacaacaaacaaaaaaaaatgcaggttctgccccccttcagttattagctactatctcgcaaaccacatatgcaaattgcatgaaacttggcataactaataatatatgagtttcttccaagctgacaaaatctgcccaatgggacatcgtttgattcatcaaactaacactctaccaaatactccacatgctgaaactgcagagacccgaaatatggtgctcttctcaattaattatcgcacaaacttagcagactgaagtgctctgagttaagaatgaactcaccaagattggtgccaagctgatcacgttngagtctncagtcactaacttgatgaaaatcttgca

SEQ ID NO: 78408 - DNA, 434 bp, Oryza sativa
  unsure (1)..(434): unsure at all n locations
taagcttccctctctctctccatcttttctctctcctcgtagaaaaaaggagcagcagtggatgtcgcacttgcaccctaccctgtgaaaaaacaagtgcatgacacacaagatcgccatgagatatagagagagagagatggtgaacgacagtgacctcttaccagacagcaagtttaaaccacaagcttatatatatacaaatcaacacacatacacaggacatgtaatgcccttttntttccttcattgatatccctttgaaaccaaagccattgatcaatgctcatattttgtaggaataagaggaagcacgagcactactgcactagtggtgtggcgccggagtccgtggtgcattagtcttacccactaagattcaaatcatgttatctacgaattaacgaatactttgcatagaccgagttttaaca

SEQ ID NO: 78409 - DNA, 98 bp, Oryza sativa
  unsure (1)..(98): unsure at all n locations
tacgtacanaagtctctactctctactattttctctatcttctctgctactccctctgtttcaaaatatttgacaccgntaattatttaacacgtgtt

SEQ ID NO: 78410 - DNA, 451 bp, Oryza sativa
  unsure (1)..(451): unsure at all n locations
agcttcaatttatatgctcgtgccaagcttgatgctntgattgcgaggatgttctatacatcangtcagaatatagcatgtttttttttcagttctaacattatcaattttgttttgtttatgacgtgcaactaattatatgtgtgcatttggtttgcaggtattcctttcaatgttgcaagaaatccatatttcaggaaggcttttcagtttgcttgcaacaaccaacttggtggttatacccctccaaatttcaacaaattaagaacaacacttctttgtcaagagaggacaaatgttgagcgcttgctgaatgctctcaagtcaacatggtctactaaaggtgtgagtattgtatctgatggatggtctgatgctcaaaggcgaaccaatcttgaatttcttgcagtgacagaagatggaccaatngtnttaatagcaatcaatactg

SEQ ID NO: 78411 - DNA, 422 bp, Oryza sativa
  unsure (1)..(422): unsure at all n locations
tctgttggtgctgttctgtacaattattagaataagaatgtcttctgcatgcatgtgaagggttaagaatgtcttangatgttattgttcgttaagtttaagtaggctagatttgcaagttaagttaatattttgtagcactttatgttgtgtattttattaccccatggatcattgcaattgaaagaaagttctggtatagaacatcttcaaacagattttgatgatatactggtattttgcagcaggctttccttcttgatatgctaganagctatgaatcagcactcggtgaatcanataccaaaacaccatgtcgcattgcacgattcccacctccattccaatcagttccgtgtaatcctattgttcttgatatggcctacaatgcgatcgagtttccaaacattgagaacagaatg

SEQ ID NO: 78412 - DNA, 349 bp, Oryza sativa
tcactcggcccggatctctaatcaactcagctgcagccatgctctattttttattcgaataaaagagttaaattaaattaaatagaaataccccctatctttgcttacacacttcttggacctcaaacccacggatagtgtcttttatatattaattctgggggttgccaaacagggtaatatgtgttcttccatacagcccatatatgtacacaaacagtgcttcatcaagacagattgacactatgtagtgtagattactgctcaatcttcggcctgtctgtctatttaaggccattgctgttgatacttgtgtcaatataaacttattcaaatgcaactagtctac

SEQ ID NO: 78413 - DNA, 369 bp, Oryza sativa
gttgagggtgaaggtttgatttatgctacaagaaggaatttgtctcaaggtggagtttgttgagttttaatccaaattcatttgcacacgtataaaggctaacttcggacggagcgaagcggaggcccgtcgccggagacttgggctggagcaaagcggccgttttagggtttcacctttatatatacttctggaatgtaagctgccgttcggcgttctaacctcattcgatatatagtgaagatatatgctagctggcgcctatggtttttctctcctaatataagaggggttttcacgttaaatcttgttcttctgtgattggtgatcaatttttatcgttaattgccgaccgtttctaaaatattt

SEQ ID NO: 78414 - DNA, 450 bp, Oryza sativa
  unsure (1)..(450): unsure at all n locations
tgcaagcttggagactagtataaagcgattcagagcttatgctatttgatttctctcagatagaagatgctactagcaacttctcggaagataagaaacttggagaaggaggttttggctccgtatacaaggtaaaataaattagatatatacacacacataaaaatcttcaatacatgtttacttgaagtatgaactacttgaactcttgttgaaaaaaaatgcagggccaattgcccaatgggcttgaggtagcagttaagcgacttgctgcacattcaagtcaaggcctggttgagttcaaaaatgaaattcaacttattgcaaagctacaacataccaatttagtaaaccttcgaggatgttgcattcaaggagaagagaacttactaatatatgaatacatgccacacaagagnttagacttcttcatcttttgtatgcttatac

SEQ ID NO: 78415 - DNA, 326 bp, Oryza sativa
  unsure (1)..(326): unsure at all n locations
actagcttcttggtgtagacagctgctttataagcattgttgatgtcgtatatcattgcttttcgccacttatgtgtgcatatatcttaaagagcaacattatggatgctgtctaataatatatatggtcattttaggcagttggacaatcattctgtgtgtattttacttggatttacactacanatgccatatatatttcgctgttgcgatgtagtgtgtctatatggacataaactaatttgtctggaatatgcgcacatgtgacaacctagaaaattcttactcctgctaaaggcttntattaatcattatattgactttaa

SEQ ID NO: 78416 - DNA, 319 bp, Oryza sativa
  unsure (1)..(319): unsure at all n locations
caacaaacgtgagtggtttatgattattcactntaatacaccaggtgaattccttctgccatgcaggcagggttggacagaaaacacgcgaaggaattaatatgcctggaacgggaaaaatgaaacatgtcagtttgactctgcacgttgagaacgacctgatacatcaacttaatattggcgcattataacctggcgcacgcctgattactaanaatctggcggagcaattatgtatgagtattacacctgtgcgtgaagcattattacgtctggtttcggtgaatgcgctatctgtcgcacctgcacaagcatttac

SEQ ID NO: 78417 - DNA, 420 bp, Oryza sativa
agcttctcttcttctcttctctgatcccctgcttaggaaatatttagcaccaacacgatgaacgcgtctgggaggttgatgtgacgatcgaattggtaggtatcgaggaggaggtggtgttggggaccttgatgtggagcagtggagaggaagacccagccatcgtcgtacgcgccgatgtagcgagcgtaccgcacccaatccgggacgacggctgggtgggtggcgtattctctcaagatgcacgagacggcaggcccctcatcgagcggtaggatgagaaacggcagagcgggagaccggtgcatgggagcgagctgctcgagggactcgcgccatgatcggcagacggcggcgaagtgcacgcgatcgaacttgcacgggaggcgggtggcgatctcgcgcacgacggcgccgatg

SEQ ID NO: 78418 - DNA, 422 bp, Oryza sativa
  unsure (1)..(422): unsure at all n locations
catttgatgcctattagaatcgatggtgctctaaaggttattttacatcaaaaaatttttttcttcatattacagtatcagctagtcaatccacccaatnttaatataattcacatgatttgacattgaatggtttctatatgcaggctggacaaaaacgtggaaggttgcttgtaaatcttgaagaagatgaacaaccaaagaagaaagttcgacttggaagcccagcaaatcagtggatatcagtctataatgctaggagacccatgaaacanaggtaacaaactttgacctttgcatgcttgntgtaatcttcattttcacagtgagctcaactatatgaaccgtatttgtgatgtatgacgtgaagttngatccacaaatagtctgaagtcacgtgcgaatcatagttgtactcaact

SEQ ID NO: 78419 - DNA, 438 bp, Oryza sativa
  unsure (1)..(438): unsure at all n locations
agcttcttgttcttcaatgttatatntggtctttcagaacgagatttggcaatatctatctaaactatagaactctgtttttaactcttcatgcactgagtccctctgaatatgtatactcggtcaattatttctgccgacaaatcaatgtccaatgttcaatacctaggcacttcactgtttttctttcaattacatcaaaaagttcaatatatggtatttattgtttatctatcaagccaatttttcagagtttcaattttatacttgcgtgtaaaacatttccacttcattccctttttccaaacaaaaactgtaggatcgaatcacaataacaaagccaaccaaagaggggtgaatggttggtatacccaataaccgataacttttagcggaaattagagctaacctcaatttctacggaagtcggtctgaccg

SEQ ID NO: 78420 - DNA, 468 bp, Oryza sativa
  unsure (1)..(468): unsure at all n locations
tcattctaatctaacattataagcaantcanaatttcttttttctttcatacactcgacagttgaacgcttgcgcgccataacccacgcagccgagagcccgagatatttacctggaggctggctggcgcagtaaccggtagtaactatatttggatttgacacatgcgcgccatgcgccggctcgcgctcgaccgagccggcaatgtgccacgcccccgcccgccacgcgttggcagcctcttacggaccagaccatatgcccacccgcttgccacagtccacagccacacaaatccgtcgcccgtgtgccacggtgccaccagcgccacgtaaaagatgcaatgcgcctatgatgctactagacgagctgccgcccncaccggtaaaccgtgcatgataacacgtacgtgaccggtagtaatacacatatacacacacggccaccggccggtagggagttctcgcg

SEQ ID NO: 78421 - DNA, 438 bp, Oryza sativa
  unsure (1)..(438): unsure at all n locations
agcttatctattntattatgagatgtctacgtacttcctccgtcccaaanaaaagaaccaaccagggttttcaatttcgatttcagctaaaatttcggccatttcggtagaaccgaaatttcagagatttcagtatttttttgggccaaaattttctgaaattttgacacaatttaattgaatttgactaaattcacaaaattcgagaaaaaccgaaaattttggccaagatattgacttgcccagggggggggttcgaaattaaattactgaaatttcaatccctgcctcgtactangatgtaagttgttactangatatgtaagtggtcgacggtgtcgaaatttgggactctgttcacacaatgaggagtggggatggctgaacaaatatctgcatcctccacgttgcttgcttgcagcatatttgaaatcattg

SEQ ID NO: 78422 - DNA, 497 bp, Oryza sativa
  unsure (1)..(497): unsure at all n locations
gctgcttaatgttgttcctgcgtcattttgtacattattatngctcttatgaaccgcgcgtatctcaaccgattcgattatattcttaccaaggtaaacgaagtctcatatctcaccattntacagtaatcaacagtattttctatttactttcttgccggctttgtgggtgtcaaggttgcgacgcgtctgtgctgctgacgtcgcccaacaacaccgtggagcgcgacgcggcgccgaacaacaccagcctccgtggcttccatgtgatcgacgccgccaaggtcgccgtctagcagagctgcgcgcgcacggtgtcctgcgccgacatcgtcgcgttcgccgcccgcgacagcgtcaacctcaccggcggcgtctcctaccaggtccactccggtcgacgcgacggtaacgtattcgtcgccatgacgccatcgacaacctcctcagctcacctttaccgacgctcagctcgttgacagcttcgtcaacaagtc

SEQ ID NO: 78423 - DNA, 452 bp, Oryza sativa
  unsure (1)..(452): unsure at all n locations
agctttctatttatttgtttgccccacgagggtcactagccgagtattggcactagtcagtattcaattatcacatttacttcggtatatcccacaagaaataaccacttggatcagaagccactcggataagatgcacttagtctacaccatccgggagatttgtcactcgagagtagattaaaatgcatgctacacgcttatagtttcaggtgtggtggagctgtatgtcttatatggacttaagcatactcatttttgtgatatatgcactgtgttaacctaataccttcaaaattcctttgctcgctgcanaaaagaactcttttattaaaattcattgctatgcacagtagattttaaaactggccaatagcatgctttcatgacttctctaaaactggttntttctccatagaagtcacgtgtaatatggtatcatctttatgacg

SEQ ID NO: 78424 - DNA, 481 bp, Oryza sativa
  unsure (1)..(481): unsure at all n locations
tattacattatcgcacggtgcaatgcgagaatganaatgcatatcattaatctggcagatgcaaaagacatatggctatatctgggaaatggtcggtaaagcagacgaaggtctatgctataaatttcatgcatattcaactgccactgccactggcaattatctgggatatcaaatgttctatgaaagtcttaaatgcttatctggttattattgctagtagatcagctatgcttcactggagacaacttacatctcttttccacttgtccatttgtgaactcaagctggcataatctatgaatgagaaaatgaaattcatgaacaacgtcattactgctaggaatgaatatgtgcaacctttccttattgaagtggtggcatagctacttgcggcatcttgtgtcaacagaatggtatgaatntcaacatcagataaactntacacgctggaaacactgctataacgaatataccactc

SEQ ID NO: 78425 - DNA, 440 bp, Oryza sativa
  unsure (1)..(440): unsure at all n locations
agctttgcctaattntggatttaattttaaaagaagtttatggagttaccaaaatatgatagaggtaatgatagtggaggcatgctagtttattgcgtactcagtgtttaggctgaaattttcggccacacgtaaaatgagacaagtcattagcatgtaattaatagagtactaattatcataaatttgaaaatatatatttatttgtaggaaacatatcgtttagcggtttatgaacgttctaacagaaaacgtaaatagttgttccaaaaggctgaaatgaactcttgctaaggctaatttcttgctaaggctaatttcgactacaaactaaacatccttggatntattattgatttttgaanaaaatatccattntactctcgcatactattccattggntcacttaattaactgtctaaactaatttttactactt

SEQ ID NO: 78426 - DNA, 437 bp, Oryza sativa
  unsure (1)..(437): unsure at all n locations
ntagcttatctggcaatgcaagataaaatataatgttctattatattcaatggctgtgtcgacacgtagcactcctctcgttggaaccaaatcaaaatattcgctgaaacgggacaatattagcataaacacctttatttaatttgattctaccacgcaacatgagtaacacatgctaaacacgaagagcgtcgagatatagaaaatgggttgaaaatataacaaaagcgtgtaagtgcgaatgggtgacgtcaaactgttgcttaacttctaatgatgcaagcatgcaaccgttctctataagagtaaaaattaaatagaaaaagaatataagagaacgatatgatcctcacctgctacgaactccggtgtcacgtcggcgctgcgccgagtaataatagctactctgtgcgccatgcccgtagtcgccgccgccg

SEQ ID NO: 78427 - DNA, 207 bp, Oryza sativa
  unsure (1)..(207): unsure at all n locations
ttctggattgtgcccgaggagtantgcggatctagatcccgggaaccataggtcttgctcacggtaatggggttgaaagttcgtgggtcaaaacttatttttttaccatagtggaccaaaacaatagaaaatcaccatatcttggcccaggccttgcctctgtgggaggcacgacaagaggaatggctacgagatggtggactcaca

SEQ ID NO: 78428 - DNA, 504 bp, Oryza sativa
tcgtggtgatctgtgggaccatttccagccatatgctacctgtaagctgtcccgcgctgtgaagaacaaccagatcaaggccttcgcgtttctgtctagcttgatcagccatcagttgccatctggacagcatatcactttctccaacagcctgtcgggcggcaacatttgcagctgtaggtctcatcttgtcatcttcttctatgttgggctacaggtcaagcatattatgaaaacatgggctgccaccaaacctaaatatcacattagtaaagttacctttgcattctttgaacgagtttcctccttttccttgtctaattccacagtgccaccgccgtcaacctgtgtgtaaggatatggttaattagaatgactaactgcaacatcgcaactcgatggacctttcgtaaccataaataatgtatgatcttcaacagtgagaagacaaagaaatctgctacagtccctatcatgtgaagctgcttataactgtttcgtgtc

SEQ ID NO: 78429 - DNA, 121 bp, Oryza sativa
agcttgcatttcttatgtgctcagaccttccagatcagcgagtcgaaggttgtgctggaacctccaaaacattgcgcttgataagctgaggatgccgagtagtgtctgtcactggtgaact

SEQ ID NO: 78430 - DNA, 170 bp, Oryza sativa
  unsure (1)..(170): unsure at all n locations
tgcagctngacgctatcatggtggtttatttntaaaacaagttattggcgcatcccattcttgaaacaaggatttcaaaagggtccaatcgtcaaattttcagcanagaaccggatgttgccatgttggtgaagattcattgttcgctacctttctctctctctacacct

SEQ ID NO: 78431 - DNA, 279 bp, Oryza sativa
  unsure (1)..(279): unsure at all n locations
agcttcaacttgtcacactatattntaggctgccaatcttctttacccttgtgttagttcattgccatagatatggcaaaccatactattttaccatcttaccccacatgtcatagacttaatcttttgcctaactttgccacaagtgtagcttacaatttataggccatgaaaagtgtggcaagccacacttgcctaacattgtctaaagtgagttatggcaatgttagttaaaaaccaaacagcccctatagttcaaatattattgctaacataact

SEQ ID NO: 78432 - DNA, 444 bp, Oryza sativa
tatccacattcatatataatagtagacttaatacgcaaggagtagatatatatccggcctctatatatttataagtggatatacacaacctccttagtataagaattatggcggcattatcactcattatactatcgccgcgtgtagttccaaaatatatcttcaaacttccaacttttccatcacatcagaactttcctacacacataaacttccaacttttccaatttcaaccaaactttcaattttgacatgaactaaacacaccctatgtatctaggcattttggactttttggaggctacatcataacctgtgtgttcacgggcgctgaatcacctttctactgtcccttctccaccagtgaagctccaaccccagtctcaggctactctctttctcccatgaccaagaaaatttgctaatggactaaaccatatacat

SEQ ID NO: 78433 - DNA, 230 bp, Oryza sativa
  unsure (1)..(230): unsure at all n locations
agcttctgctgcaagttctcattatagcgagcattctgttactgtgagtgatctagtgccacaatatgtgttaatgcttctgngccgtcatactttctagtgctaactgaatcacatgcagattaaggcanagaaggtctcttggagcatgggctcttccttccccctcaagaaagccacanaaggtcttccaaagattcagattgatgatgattctgaactgattgatg

SEQ ID NO: 78434 - DNA, 472 bp, Oryza sativa
  unsure (1)..(472): unsure at all n locations
tcgcaattaagagcgagatttaattaatatggctggatttggttacttgttcgcggncgatgggttgcccgttctggtcaaatgaatcgaccaatcgtgtgggtgcagntcgtggagcacgctactgactgtcgtcactgcatgcatgtagtggtacacgttaattacggtgaaagtacatggaaaataaaatgtctttttctttttcttttgcaagagcaagtaaaggtttcggaggaatacaagataggtgtccctgtctttcggccttcactaacagagattgttgcgttgctccaggatgggatgggtgagctatgctagtgcaggaggcaagtnggtagtacaaaactacaaatgttgcatatacatactattagtactacccctctttcaaanagactatagttgtacaggtttatatctaacgtttcatcatccgctntatttgaaaactacacgtttatttgag

SEQ ID NO: 78435 - DNA, 480 bp, Oryza sativa
  unsure (1)..(480): unsure at all n locations
tgttaattntctcttcctctctctttatcacgcatgatttaatttttaatataccattccaatggagaaaatatcaacctacaagattgatgcaactttcaaaattaaaaacaactccgcatccaattaatacaataatacagtaaggctacactaccttttcattgtgacgatcgtaagagtttacaagctctggggcccggtagggcagactgccataccaacccccatggaagtcaatgatatatggnggcntcgtttttttttggctaaaagagaaaacagaattatcagcatcggtagtaacttgaatgatattaaacatatggaggtgatggttcatacctattccaaaatcagcccaatttactgtatagatttcttcttagaggatgtttcccggcttcacattttgatgcacgatgccatgccggtgcatgaagataacggaatcaattaactgtgcaaacatattatgct

SEQ ID NO: 78436 - DNA, 179 bp, Oryza sativa
tattctatcaggaaggtgatcctcggctgtcaagattttggactaatgaagaacagccgcgatgggaaaagttatagcactaatctggcttacaccccgcctgagtttctacgaactggtaggaatttacacatgatccttattaccgcactcatgggcaccttactctattgatgttt

SEQ ID NO: 78437 - DNA, 158 bp, Oryza sativa
tacttttccacgaattgacgcctttttcaaagcctataacaagcagctcatccaaatattcatcagggaataggctatctgctactgaactgaaattgtgaatatcataaactattttgctcaccggacttatgacatgtatattgggtgccatgaaa

SEQ ID NO: 78438 - DNA, 236 bp, Oryza sativa
  unsure (1)..(236): unsure at all n locations
agcttntatctttatcatcgatctcctccttgctcttgctcttgcggctctcttcttcttcttcctttgccttcaatgccaagtcttccttcttgatgcttgtcattgagccttggttgatgtattggatgacctccttggactcttgcacaagcatgtcacgggcaagaatgcgtccgagcaaatcatgaggtgtgagagtcttgtaatccggacgctcacgaatgatggtaacc

SEQ ID NO: 78439 - DNA, 489 bp, Oryza sativa
  unsure (1)..(489): unsure at all n locations
tgtccgcatcccctnttcctcctcttccctctntctctcggttactttccttctgctnctcctccactttccgcggccacctactccttcctccactttccttctccttctcctacattattcccgggctcgtactcctttctccatttcccggcctacacatggcggggacagtggctctggagtgggtggcgcaaatgcgcggagatgaccgcctcgactcggggggcgcatggagacggcgtccttgggggcaggcaatgctagcgcgtggatactgccgctggctcgtggggcgcgtggatccaacgacctcggggcggatccgccgccagcttgtggcggatacgacatccccgtccttgngtgcggcggcggtagcctcggactgggtagatcaaccactgaagttgacaaaagcgacagatttgctcttatgagcggtggcggtggcctngggacagctgcgacacccatgggagcgacaga

SEQ ID NO: 78440 - DNA, 215 bp, Oryza sativa
aaaaaaacactactttatttgcaatactcaccagtctggggcaaagtgttgttgacacacacaaacaacgctgttcctggaggcaaatgtagcctgcaatgaagtatgaaaataaagtgcccaactggcatgttacatggaaccaggtacctgcaattaccactggctttcaggctttcaaattacaccagcttctgagaacaggagactggcta

SEQ ID NO: 78441 - DNA, 258 bp, Oryza sativa
  unsure (1)..(258): unsure at all n locations
agcttcttgagggagatgtccagagttnggtagacccagagttaaatggtgacttcagtctagaagaggctgaaagactttgtaaagttgcatgttggtgtatccaagataatgaggtcaatcggccaacaatgagtgaagtggttcgggttcttgagggactacataattttgatatgcctccgatgccaagactacttgctgctttagctatatgatctgatgtggatcattgtgatagttcatatataaattctt

SEQ ID NO: 78442 - DNA, 240 bp, Oryza sativa
gctgcgcagccacgcgactcttcctgacgtgcgtctgtcacacttcgagctgctcgtcgaggacgtcggccacatcgagattgtccatgttcccttccctactgcaatacactgtcgacatgtacaaccacgctacgtacctcgtcgccactgccgccggctgtctcgatgacgaatagtatcatgcctaattctcacatgtaccaacgatgggacctaagtatcaaggatcatgggtac

SEQ ID NO: 78443 - DNA, 215 bp, Oryza sativa
  unsure (1)..(215): unsure at all n locations
agcttagctactacttctgtgctctactgtactagngtcctactagtaattgcaaaataatcgacaataatgtccaggggagactgtatggatcgattctccatcagccaatctgagaacaagaagcataacaacaattttttntttttagaaacacacattctgacgtacagcgttgatttctgatcaaatagttggaatcatggtgttcactt

SEQ ID NO: 78444 - DNA, 476 bp, Oryza sativa
  unsure (1)..(476): unsure at all n locations
tgtcctccagaggttagagaatgcaaacttagagttagtcgccaatgacttgttagttacacgatggcatcgccaaatcctgtaccacgtttgaggttccccctcgtagtagatgttttcagcagctgcaggagctgctagttcggcatgttcccacttctgagctttcatatggctntctatagaaagtctgtccagttgaaaagaatgtaacttgcaaaggatgttagttaaactggtctgtaaatattatgttctcttggcatccatatctacctttgctatcttatctagtagagtgagaggctttgctatcctctgaagcacaccgactcttctggcctttccgcacataagggaactagtatgtctcgatggtctctnttcttttttgtttctgtggtcactaaggatagcatagcaagctaatttgtgtggccgacgtgaacttaacgctctgttgatttaatacccta

SEQ ID NO: 78445 - DNA, 252 bp, Oryza sativa
  unsure (1)..(252): unsure at all n locations
agctntaaattacgttgttttggtctattctgattcattgtaatacgttatatttcattctatnttagattttttttagtcaagggaatactttttttactttcggctggtcagtccatccgaactccaaagtatgggtgtgtttagattcaaaatttggatccaaagttcagtctttttccatcacatcaacctgtcatacacacacaacttttcaatcacatcattcccaatttcaaccaaaatcctaac

SEQ ID NO: 78446 - DNA, 498 bp, Oryza sativa
  unsure (1)..(498): unsure at all n locations
tctagcactataaatctaaatatataatatcaatgtgttcaatcttatttatataccttatactttaaaacgaaaagactgtatatatggggtctgcatcgnctgcctttggtctcaacggcagactttgccgntgcttccatctcatccacccgtttagcaatcaatggctgcatgcgtgagccacacaaaagtgattaattagcagctatgtcttactgagagattaaggtgtttcacttgagaaaaaatatcaccaaacaaaattcgggcacacagatatgattagagcacgctggannaaaaaattacatctcgacttacgtgttctaccttctataggaaagaacaaaaggtacgtagccacgtatgttcttatcttgcagtcatagagaagactagcatgtggctcaattagtctcaatcgatcgcacgataacatcatgcatcatttccgtggaattcatgcatctagctgcatgtggaatntgactattt

SEQ ID NO: 78447 - DNA, 250 bp, Oryza sativa
agcttccatctgtcttcttccataggattcttcaacctctgctgcaccccgcagattaccagcttccatccatggctggtctcccctatttatacaccaactcctttccctgccagcttcgtctcccaaggcaagagcaacgcatagcatagaacagatacttcttctctccacctgcctcgcaagcttcttctgtttcttggatctcacctcaccacgccatcgacgccataaagagcttgtgataagt

SEQ ID NO: 78448 - DNA, 461 bp, Oryza sativa
  unsure (1)..(461): unsure at all n locations
taaagaatgttcgtttcacaagaatataaacttcagttctttcttgttttgcttcctcctttctcttgcattngacatatnctgtacaacactacaacttgactacacaagatcatctgagtattcaactgctgacattcttgatggcactcttttgacctgcgcacaaggctgaatccgagacttaaccgcgctcaattgtccactaacatagaaaagctgctcaagctggcataatttagtttctacattaatgccattacataatttacagctagattgctagtactatggtacatgctagtatatcacagcgtacatcacaggaaatcccagactggaatggtgtactggctttgatccgcggcttggtgacccagtcgaggattgctgctaacaaactgcaatgactggatgtccggatgtggtgcctacacgaaaacacggcatgccatctacta

SEQ ID NO: 78449 - DNA, 208 bp, Oryza sativa
catgtactgttgcagcatcaattgcttaagggtacctctttcacacattgaggatgcccttaacacttatcttgaagattccatagataagattgctgacgagagtttaaacgttgtcgaactaagtttcgctatatacacacaaaaaatcaatgaaacatgaaaaaataagtccaatacaagtacttggattaatatatactctcta

SEQ ID NO: 78450 - DNA, 468 bp, Oryza sativa
  unsure (1)..(468): unsure at all n locations
nntctaattgcattttcgagctggaaaaatctgcanattatgtttgtgacataactccgagggaaggcttttgaaaggacaagctccggagatttccaggtaccgtagatgcttcaatttcccaatactcttcggtagctcctttgtgtgggcacacaaaaccacgcgcatatgctgaagtttactacaccaatggtccataacagaagctagactttgcttctgtaaagacctgtagcacagtagagtgcgcaactntgtgtgcttacataggctcagcaactgagtacaatcaaaggctatgctagggagtacgaacagatgacgaacactcggaggaaccttctcaaaatcatncttgtgttttaagatgaagcagtcatcctttgaaactagttgtgccatgtcatgcaacagatcattacatgtttattaccaccaacactctgaaagaaagaaccggttaca

SEQ ID NO: 78451 - DNA, 279 bp, Oryza sativa
agcttagcatatgtactctgcatcaaagaaatgcatcacaacattcagcataaacaaaatgaaatgtgccacaagacttgccctacagaaacgagaagaacctgatttgttagctggttcttgaacttctcgggatttctcttcctctcagagtgaaattcgtaagacacttgtgcatccatccctgcagtatgtgaagtcatgatgaccatgtttctattactgccttattaatcatgatatgcttaaaagatactaatatatgttctaccataatat

SEQ ID NO: 78452 - DNA, 463 bp, Oryza sativa
atgtcggtgccgtttggcaaccggagaacgaagttcctcgtgtcgagcagcacggcggaggctccggtgacgctgatcttggttgtccaaagaatgtggccttgggagtccgacagcaccatgcctgagctgttggtgatggcaagggtcgctgacgaaggggtggtgattgggttgtcgcggttggcaacccacacaacggtgcgctgggggatgttgtggaaccagactccaacatagaggctattgctgaagttggccggggggaagaatccgagggcaaagatgccgcccttggagatgagcatctcgctgggaaagattggctttcccagtgtcagctggtcatcggttttgcatagatgaatcgagagcagcacgaggaacatgagaaaatagaccatatcgcctgttagactttctgcttcgtttgcttggcatgggtcaaagtatatctttcatt

SEQ ID NO: 78453 - DNA, 241 bp, Oryza sativa
agcttgtatattgttatattaagaaatttccaaagtattgggcatacgccatgcgcacactgctttaacagatgtgcttaagtccctagaagacacatggtttcaccacacctggaaatatatggcatatgtggtgtaaaatccgagtaaataaactcataaaggatttaccaaccgcctagaaaatgaccacaatatataatcagcctaagccataatattggtcaataaaaatgcacac

SEQ ID NO: 78454 - DNA, 486 bp, Oryza sativa
  unsure (1)..(486): unsure at all n locations
taatattcaaagatgccacatcatcatccactaataagatgttatattatcatccactaacaatcatcacatttaaacatcatgcaaacatgctatatctttatagtctttataatttaagagcttttcaaatacaaatatgttaaattatcatccaacataattcacataatgtttcaatgtatatcttttatgatatcctatatacttatacagntcatcctcacttagttagtgcttaaatgattaatctatggtccaaattatatttctctttctttcctctaattaagtcatatcacattaatttggttttagcctttagatgattaatctacggtccaaactatctctctactctgtttcttccataaagncataccaccttactttgaatcaccattctacatactatttaaatttaaattatcataaaccacattaatgtacttaatctgatattatctaactattctacatgttatt

SEQ ID NO: 78455 - DNA, 238 bp, Oryza sativa
agcttctggttgttctgtgtttgatttccggagtgtttaggtcagttattgcttctttgctttgttaaaactgtgcttaagtcgtgaacgcgatcattagagaagccaacaagtaggtgatgctgcattcatcggaaaaaccaaagaagttggtaatcctgcattttcaagcatgcattctgtatttctgtccacaatacaactgtacctgatcacattgttgttgtggtgaaaactg

SEQ ID NO: 78456 - DNA, 488 bp, Oryza sativa
  unsure (1)..(488): unsure at all n locations
acacataaaactcagcttctacagtatcggtagacaatactgatgcttgaatcagcttnttctttcgctcctgttgggcctacatgggatatcgttatttcttcattgcgaacaaaaccaggcgacagatntccagactctctgcttgaagcaatcttaaccattgaagtctcacttctcacaattgcagatatcagatcattttgcttcacgttccccctgcattagaagaaatgaattatgtatccttgcatccttcttggttgccattcctctctgcattcagttaaaagcacgtgaataaaaggtgtaatggggtagcattaacggtataccgttcaatcatgagaatgtactgagagtctttctggcgtgctcgtccacgtgactgcacatatctacagtgtgtccttggcaaatcaaatcgtattacacaagagcattctgggacatggataccctcttcagcaacatctgtacgtaatagt

SEQ ID NO: 78457 - DNA, 446 bp, Oryza sativa
agcttgttatcctttaatatacttaatgctcccatggatgttgattacaatagagtattaaattcaaaacatgtgacatgcaatgttaatgtaatagcttcccttgcccatgcagtagacccttttgcaaaacgttagctttcaataacttcgacattgcactattggtgttagcattatccaaagtgatgaaaacaatttatcttcacaatacaatcttatatggtctctaagattgtattgaatataacaacattactctccaatgtatttatattttcctacactataactctccatatctaaaactaccttactttatccttatctcaataatatatttctattatcatgtgttattataataatatataacataactatacatatccatactatgatgtttcttatcatttaatatttcaatattattttcttatttaata

SEQ ID NO: 78458 - DNA, 395 bp, Oryza sativa
  unsure (1)..(395): unsure at all n locations
taagagatataacaatcgnnaaggccgacaagttgtgtttacccatcaatcattntacatcagtaataacagcatggacgaaaacgagctaacataattcctgacagcctgaactgcaacatcaagatttacatgaagatatgaaccaaaacagtgacctcactggcttgtcgcaatcccctcacgcccaaccgtaaatcaatcgatccagagcaacaaaaactatagttacctcgtgggcgacgttgggagctgcgaaggcgcgaggccggcgaggtggacggngaggactgcgtgtgacggcgaccgcggtggcgccgatatgaccgatgacgagcgtatgccgggcgatgtgaggaggaaggcgtgcgacatcaacgctgatccgggtgacg

SEQ ID NO: 78459 - DNA, 273 bp, Oryza sativa
  unsure (1)..(273): unsure at all n locations
agcttgccgatctcttatctgctgcaaccctccatgcacgtgtgaaatgcaactaatctcgtatgcagcaatcagtcagtaattctagcaacattagcatttctggctaaattgtgtggtttgataagaantttggagtaatttactaattgtttctggttcaaatcagccatcttttgtaccatcagttgcacggcagtcctgtctcccctgcatcgacattctaaacgtggaacaagataagtttgctacggaaaaanaaacgatatgaaa

SEQ ID NO: 78460 - DNA, 461 bp, Oryza sativa
  unsure (1)..(461): unsure at all n locations
tggggtcatctcaactcgggaagacatttccacggtatgttccatacttaagctcacacaatttcccaaagatgaagcaagaagatcgattggtattttaccccagaaacacttcccttcaagctctgtcaaaatgcatcacatggttcatagttagtccatttaacaagagaataattgtacaaaactatatttgcatgtttgatttttgagcgtcatcttttgcctctacactgaattttaaaggtacatatttaaaactatatatatgtttgctataagcagtagctgtaactgcgaggatcctttcaaagggtgaaagcatgaaatctaaattaatcacgatagacagcctattaatgtgtctaaccctgtccgaagaggcaaaactagtaacataatggttcacgatagtttggttatttgaccgcaatacacattcaantttcattcataaaagc

SEQ ID NO: 78461 - DNA, 328 bp, Oryza sativa
  unsure (1)..(328): unsure at all n locations
agcttcctttagtagatggatttccttaaccgaatatagtaggaatctgactattggcgactttataactcccatcggctgattccgagatgctgcagccgataatgattctaagccgatgatgtttttgccgattaccaaatttcactgttaacagtcttgaaagctaaatatttcctagatggaagcattctgcagtgtgcgccgcgggacgggatatcatatacttggcgcagtatcttgaaaggagtcgatctcatcaaggaaggtctagtgtggcgagnatgaacacaaatacaattataataccctcattattctctattta

SEQ ID NO: 78462 - DNA, 464 bp, Oryza sativa
  unsure (1)..(464): unsure at all n locations
gtggttcaaaacaggaatatgcagtgtctttacattcgctatcaatcctaatatctaccttataagacaaacatgaatcattcagctaacagaatttaagggagcacaagtaacaaatgtgctttccaccatatttaatcttatgacactggttaattaattgcttgtcctcgtacggaatgtgcagatcgacagtaagcttcagcaatgcctctctcgaaacttctgccctgtaggtcattntatcatcctattgtctttggactctaagttagacaagcatggctattaaaaccaatcagttaaagcagatgacaccactcgattttcaatgctgcatatcactatagaatangaggaaacttacacgtatggagatgccacccagacccctatgattgcctacaacaacattccaccctttgcttgccatagaatagaccaagtgctttacatactgcaac

SEQ ID NO: 78463 - DNA, 104 bp, Oryza sativa
  unsure (1)..(104): unsure at all n locations
catcatatcctgattagacgtagctgccgggttacagcangtccttctactgaatcatcacctaccctcctaacttgttccttattcaacgctaatgatgcttc

SEQ ID NO: 78464 - DNA, 478 bp, Oryza sativa
  unsure (1)..(478): unsure at all n locations
ctgatgttcttccgacatggctgctatgcacaacacaagtgcatttttttatcactcactcgnntgnctgncaacacattaagctttngcttctctgttcgttatacatgggttcttagttcttacagatgtctatttcgcgccattttagcatttctttgtcactgcctcttgttttgagctacagacgagttaattatcggccgcttgtacttaatgtatatctatttttgttctgtacatgtgagcagacaatcctgagtnttctactcatctgcatcactatgttaaactttgcatttcccccctaattatatgcttttggtgactcaagattttctcggtggttccatccactntctgctcattaaatatatgtttctttagattttggctactcgctattgtcttgatgaagtggatatctgatcttgagttggtgtcacaatcttagttccttcatagagacgaaatctga

SEQ ID NO: 78465 - DNA, 360 bp, Oryza sativa
  unsure (1)..(360): unsure at all n locations
agctntcttagggctctgtttgtagagctccaactcccaaaatttagcttcaggagttgagtatggagtggagttgtggagctgcctaaacccaactacacctctctagttcattctatgagagcgcttcacctagctccgctcccattntaggtggagcagaaactatttggctgggctttagctccaaaaaagctggagctggagctgtgccaaacaggcccttattacacggaagccttttagaagggcccnaacgtgtaccaaaatatacaatctcatcatgagatctgctcacttactgcatagtcatatatgtcctatctaatatatttctagtgacctcatcctcttctcata

SEQ ID NO: 78466 - DNA, 483 bp, Oryza sativa
  unsure (1)..(483): unsure at all n locations
ctcaagctgtcagcagagcctgtggaggtggttcatcgatattagcaacctctctggtatgcatggagaggagcagacgatgtcacacaatagtgggagtgtgggactacaggagctagctcagttagtgtctcggtgatggaatatgcacgatggtgaaaagaacagaaacgagagtgagaggaacctgagaaaaaacagagggaacaagggcactagtgtcttttcatggcctacttaacaccaacttaacagtagtctaacagtagtggcactaaagagataaaaattgaaacccaacggcatagaaggaaatgtaactttntcggtagcatatatggaagccgggtaatttcgagtggcatataatagattctctctatctttttacatnggtttgtagttcaaaggatacgaatcaaacttggctaatattggacttgaatccagccgaatcaggtctgtttccttagctaaacataa

SEQ ID NO: 78467 - DNA, 257 bp, Oryza sativa
agcttcgcagaaccctcattgatggcggcagtgcactcaatatcctcttcgccaagactttggatgatatgcagatccctcgctccgagctgaaaccgagcaatgcgccttttcatggagtaattccaggattatccgccactccactcggccagatcacccttccggtcacttttggcactcgggaaaactttcgcacagagaatatcagcttctgaagtgccgcatttcacacaacataccatgccatacttgtt

SEQ ID NO: 78468 - DNA, 444 bp, Oryza sativa
  unsure (1)..(444): unsure at all n locations
tncaaatttcctatttcccgttcgattatatttggtcccttccttttatcctgtgacgacgacgacgacgacaacggacaacgacacctccagatgagacggtcaaaacggggcaacccaaccccaggccgtgccatgccggccggtggccggagacagcttcgctttcgttgaatttttcagcccccggtcgccgccccaaaacaaatcacacacacacaaaaataactctatctaaggcatctagctctagtagctagctacccctatcatcatcatcttcttcttcctctcgatcgccatcacctcccggttgcgtacgcgaccggcgacccgtctnccggccggtgtcgtgagctgaccctctaagcaaccaagctaccgacgacatcgtacaaacgaacgaaagaacgagcgagcgaacgaacaatcttctntccatca

SEQ ID NO: 78469 - DNA, 267 bp, Oryza sativa
  unsure (1)..(267): unsure at all n locations
agctntactcttaccttcttgctntcattngcccttctttttttttcccctgaaaaggagtaattactatagctctatgtccacccaccagatgatttcataggattgtagtaaaatgagtaatgctcaaggactgtcatgattaactgacaattacataagttactaatcgttaacggacactcttctggacccagtttctaattatcaaccagtgctacaccttatctcccagttagttcttggcaaggcangctggcatggtat

SEQ ID NO: 78470 - DNA, 487 bp, Oryza sativa
  unsure (1)..(487): unsure at all n locations
tcaatctcaaatcatccctaccgacctggcaatctntatgttgtatattggtatgcacaaaatatcattgtcaaacaggggtcatttacattttagtggataagcaagaaaacgaagtgttcatcatcacccgtaccattatctccatgctgcaaaccattggtttctatctgtcgtctgaaaagtgagtaaaaaatttctggcatgagaaagtaaaatatctaagcaattgattaggattgaaacaatcatatctatcggaatgcaagggagataacgaaactaacatgatatatctaattatatcatcttgtaaatggtatagtaagcaattactttctaaggaacacagaataacataacagaccaaagctatcaaataaagcataattgttattgacttataaatgtaggaacactcgttgagcaaaataaaaaaagcttgtgcatgtncgcatgtctagactctagatcagctaacacgaat

SEQ ID NO: 78471 - DNA, 267 bp, Oryza sativa
  unsure (1)..(267): unsure at all n locations
agctntctacacattattttctcacanatgatcaacacccaaactctntgaacatggctctaaagatgaaccacactcgcttcgttgtgcaaaacacaactgcataggaggcagttagcacatatgcccgtactgatccagctcacagaaactgcgaaactgcacgatctattatatacgtctcctttggaaaaataatatgacaatcctatttgttttttagagaagggtattttttacccggcttccacatccaaatggatatat

SEQ ID NO: 78472 - DNA, 471 bp, Oryza sativa
aaaactcagcttgaccttctcactatggttttgatgatcttattctattatttctcactcgggaggtgctttcatggcgactcgcaactggcgttcatgcttcgttggtctccaaggctcccctcacgtgctcctggaatcggggatggatgaatgaaccattgtccatctaaatcgtggtgtttataaataaatataccattgggaacatgctttcagtcgagaacgatggtgatcaatggcgtcttcccaagtcttgagcatatcgacacgttttcatatgagataaccgcaccgggttataggaaccagtcaccggacaaagtgtcatgatgtacattgatttggaaaaacaaattctatgccaatgcacacagctcatgtgaatactatacaaattgtctcctcctttatactttctgatacttacatgtaggactacgtgaccactattactggagttctatgacc

SEQ ID NO: 78473 - DNA, 244 bp, Oryza sativa
agcttgagatctctggcttcatcaagatcatgatccataagaagaatagtatcatcagcgtattgtaaaatagaaagaccattatcaactaaatgaggtgccactactttgaatctgccttgatctttcgctctttgtattaaaatggctaacatatctgccacaaagaatgaacagaatatgtgacaaaggatcaccttgcctcaaacctttcctttggtgaaataactcccaaactcatcac

SEQ ID NO: 78474 - DNA, 438 bp, Oryza sativa
gccgcacataatcgtcatgtgtactctatgagaagagatctgtttctggttattgtcgtacaggtacctttatagctggtgggatcacatcaaacaatcttctgtttgaaatgaagtccttcaattgcaaggtagcactcattagcaccactttcaactgactaatcttatcttctggattaatgctcagaccacaacgtattttttcctgttgctctatgtacaatgactgtcatgtgcataaatgttaacaatggttatatatatataatttctttcattctaatgaaaacgatgaatagtatttagtttcaaccttgcgaatctgtataattctagatagcatcccgataagtatatctgtgttcaagctcctttcgtgcgcctcatccaagatgattacagaatagcgtttcacagatagtcactctgccgatg

SEQ ID NO: 78475 - DNA, 227 bp, Oryza sativa
  unsure (1)..(227): unsure at all n locations
agcttgcatcatcaaatatatgtgtatcttttggataaacttgatatgatatgctacgccatggnggtcaaatgtcctgatacactcccagtccttgttccagtcccacagcttgatctggtcttgtgagcctactgacagtaggtaaggctcagttggatggacattcaaagttgtgatggtccaactccaagcatgagctttgaatctcttcacttgctttactg

SEQ ID NO: 78476 - DNA, 167 bp, Oryza sativa
cccgggatctctaagtcacctgctgcatgcaatttttataatttttgtcctcgaaactaagtagaagaatcaagcaaggcaatgatagaccgagtaagcaaattgaattgataataatcacacttcattattattatggtagcccccgactgacaacctcaagaaaa

SEQ ID NO: 78477 - DNA, 213 bp, Oryza sativa
cgagaggttggtatgtggcaccacaataaattatcgaaggtccaaacatactaattatttaattattaactgattatactgattcgcatggcataaatatattatattattaaagtagataaaaaagagccttcatgttcgctctcatagcctagaaatactcacattaatcggagaaaaagaaacaacaaagtccatatagaaatacaattt

SEQ ID NO: 78478 - DNA, 340 bp, Oryza sativa
agagcacacgaagtgagtgcaatgccgcattagatcgatttattcccctttcttgaaatagcaaagcacgaagtaatgcgcagacccatgcagggctatcttattcacgctgaacatatgatcatacattaaagcaatcgcagctatcaaaagaatctggcaagatatataaatagtatgtaaaaagcaacaaaggtaataaaaatatctgagcagatatctacagtccaaagtagatattatcacatgagaatgaaaaatttacggaatcacacaaagtccaatattctgaatactgaactataacaacaggaatgcacagcattcccgttacctatat

SEQ ID NO: 78479 - DNA, 364 bp, Oryza sativa
  unsure (1)..(364): unsure at all n locations
agccttgntgacatttgtcttgtgtatggatcatgggtaggatgaccaacagcagtgtaattgcctgcgccatgcttggtagccacatatcgaagtcgctgcttcgcgacggcgtcggagaacatctgaccgtactccacgctcccattgaacagctgatcattcatcttcgccacgaggcgcatcagcatctcaaggtcggcttgctcggggtcagagccgacacgcaaggagatgatgacggtgtcgacaacntcctccangttgtatgacatcatgctcaacnattgttctttcgtctctttttaacttcattatctgcttgatctatatcactagatgacctttcgctccattatgcttt

SEQ ID NO: 78480 - DNA, 453 bp, Oryza sativa
  unsure (1)..(453): unsure at all n locations
agtgtgccagttgatatgatcctgcnattttcatttaattaagacaaagaaaccgcggttaaatccataaacgatagccgatcggctagttgccgatgacatatcatttatttttgagacgatgtcatatgtgaattaatcggcaatcatggataaataagaaagaactaaatctattcgatcggctatagatgttaacaatatataattcttatgtcgatatatacttaaatcaagtgattgggatagatcagttaccatgccgagacagtataaatcacttagatcgaaatatatattaaccacaagactatatatgttcatagcatagctgatcagatagatctagcatgtatcggctaatactccgatactactctatattaagatattaaagcaagttgaatatacctaacaaaagcctaaatatacttaaatgcaataggatcttaa

SEQ ID NO: 78481 - DNA, 230 bp, Oryza sativa
  unsure (1)..(230): unsure at all n locations
agcttcggctaataatttataccaagattgaatcacagaatctcttagaagattcatcgcanatctaaattacacagaaaaattcatcacataagaccgacgttggagaatggtgcgatgggaggaccaccgccaaagggaaggcacactgccaccaccgtgtgcgtcgtgaggaggaggccgccccgagctcgtggcgaccggatatggactcctaaagctcgcaatgg

SEQ ID NO: 78482 - DNA, 264 bp, Oryza sativa
  unsure (1)..(264): unsure at all n locations
agcttcanattctcaatataaagatgaggtcatgccaaaatttattgtgaaaattntttagtaattatatacaaatcggatatgtctaaaaggttagtaacttcatcctncaatattntttttcttggtatattacttttggagctatgtttcacacatttttttttctacaaaactttgtngtaagttgatgagagagaaaatttatgtggggaagaagaatatatagaaattctattctcatagtttaaaatatgatgaaaa

SEQ ID NO: 78483 - DNA, 433 bp, Oryza sativa
  unsure (1)..(433): unsure at all n locations
tggagctganagtagaaatgggacttatcatttgttagaccatatttatttctctctttgtctaggcaggctagaaaaggtctaacacaatccaatttgaagatgggaatagatgcacaatggagggttaccgtagggaaatatgtctttgatcaagaggttgctaagaaagaacttgcactgatgatatgcctccatgagtacccactttctattgtagaccatgttggttttcgtaggttctgtggtgcattgcaacctttgttcaagggtatgaccagaaacacaattangaaggatattattgacttcgtttgggttaacaagatttctatcagtaattattttcacaagcttcagagccgtgtgggcattactactgatttatggacagcaactcatcaaaagaaaggatacatgttgaggagggtgt

SEQ ID NO: 78484 - DNA, 235 bp, Oryza sativa
agcttcagaagtctgagaccacatgagtacatgaccgagtccatggaccttgttcacacaactcgtgggacccttcgcaagtttttttacaatatctagataacctgccaaagccggtcgcagcgccgacttgcctattgtgccggcggttgcattcaatgcgccggacaatgacatgtgggacccacgcagctctaccccaccctgtcagtgacgtgagcgcgctggttctttt

SEQ ID NO: 78485 - DNA, 405 bp, Oryza sativa
  unsure (1)..(405): unsure at all n locations
tgaaaaatgattgaaaatttatttgagtgcacagtatgtgcattttatattactaatgggactaaataattagtgcagaaaatattgacataaattttgaaaataaaacaaatgtaataaattaaattttttatttgaaattttaataagacaatggattttttttatcgggagcattcatacaacaattattgtgagcacgggtagtcctatctttctaggaatgcttctcttttttatgactntntttaaaaaataaatacatatttttttatttcattatctaaaaataaattttatgataaataatgcaccgcacaacaaactcataactataatagtctcatgcgacaaacttttatatttntgataatgtaattaataaatatctatgtttatctaaag

SEQ ID NO: 78486 - DNA, 415 bp, Oryza sativa
  unsure (1)..(415): unsure at all n locations
acataaaactcagctaacctgatgtggacttactatntctgccctaacttatttcttgattanggacactgatcattcggcacagctggggtcatcagcatacaaaaactagaacatgctctttggaattatttgtgagcattattcggctgatacactgatgtcgcaacttacatgtacaagggactgacgcaacagtgaaagtacaaaagattatattctatttgtgctaaaagagtctctataaaatgctctaattttaggtgaaacgaacacatcaagtgactaacctaagttcatgtcaggcattaattggcaagtaccagtcttgaaagagctcggtttgtgacgtttgcgccattcttttatgcatgcangacgagagaggggatgctttgttattgagtaagcttat

SEQ ID NO: 78487 - DNA, 311 bp, Oryza sativa
  unsure (1)..(311): unsure at all n locations
agcttgtgcgtatgtggtcggtgtactccggcttgccgttcatgacctcgcagaacaccgcggagaggacctccgcgagcacgccaaggacgttcgcctcaaagagcaccatcgaggcgagcccggagccgacggccgtgccgttcaccatggcgaggccttccttgggctggagctcgaagaagccgtgctggatgccggcgatcttgaacgcctncgcggcatncaccttcctgccatncggcgtcaccgtcacagagattggtcggccggtgaacaaatccactaaatataataatccattatctctc

SEQ ID NO: 78488 - DNA, 484 bp, Oryza sativa
  unsure (1)..(484): unsure at all n locations
ntccactctaacgtgtcctttttccttataaagatagcactaagttgnnttgcctgttcttctagaaaaatgtgagaagagtgataagcaaatcatattttattttctttcattagtagaactaattgtcaaaagagttttttttttcaggtgttttgtccttcacatctatacatgcagaatgcctcgagggcgaggctcttctgtcacaacccatgagaaacccaaagttgatgaagcagtcagtacaaatgaagattatggcaggcgcaggagggacacctttttattgctgggattgttgatggtcttccttcatggatcctggtctgtntatcgntttcagtttgcaaatcttcctttgccccttgatgctgaacaggctggcaagcgtgggttctcagaggcatctgctctggagcatgttaagtaccttgcagncttgngtcctcatncagttggttcagattccatcgatcttgct

SEQ ID NO: 78489 - DNA, 270 bp, Oryza sativa
  unsure (1)..(270): unsure at all n locations
agctttctgctctatgctgcagtagtattcaatatgtcatccactactttagttngcattgcaataagaatgttaaaccatattcgaaatcactgaaagtgcagaattttggttctctagggctttgtattntgacattatcatcaagtggttatcttaactattgctttgtttagtaaccaagtaatttgtgtcccatggcaggttgttgtgcttcagttgaatggaattgatcagccaaaagagtctgttcatgttcttaatattgga

SEQ ID NO: 78490 - DNA, 431 bp, Oryza sativa
  unsure (1)..(431): unsure at all n locations
cgctctcttaccgatcaaggtggttggagttgatttggattttcttatatggcctatctctatgtgaggatgtgatccttctatgtggtatgaggtaaccctgggtcggcttgggaaaggctttgtcgcaaacctctgacaccggccaatgtttggagtaagtctatgtcttgagggtaaagtgtacccctctgcagaggttaactaactgttccaacagccgtgcccacggtcatgggcggatgtgaggtggttccctttgcgtacatttgattgcctgtgcttngcgaaaagttgttgtgggttggaaatcctaactagaatcagcctatttggcagatggatgacctgagtggtcagaaacggatctgtgtgattcaggatgtctgccggcatcatagactatgcttcccgagtggaaccgattgctt

SEQ ID NO: 78491 - DNA, 265 bp, Oryza sativa
  unsure (1)..(265): unsure at all n locations
agcattgtctcgtgtatattgatagagaagagataacaagagggagaaaagaactttacagggtctttaaaaggcaaaggcccgcaaaatgatctccccaactaaatatctttcaacgtaggaatctctgtgaggaatcgtgccccagctgctacccaagtgagcgcttctttctttattatagataggatggccatcggcggtttctccgtgtgtctgaaaaccctctcgntgtgggtacttttattaaacaaaaatatttact

SEQ ID NO: 78492 - DNA, 462 bp, Oryza sativa
tcttaatttattaactaagacgtcgaattgggcctaggatttgatcttgttgtctacacaaatagggttacatcaatgactatgcatgaagatgagagtggtttttgaagtttcagctaccagtaccttcgacatctttcagagccgagtccctctgttttgccaactcggccttgtctttctccagagcttggattcgcttctccagcgcggatatcctagaagcttgcactgtgttgcttttcattggtcagttgcacatggatagcaacatgaaacacatcaaacagagacgatgtttatcttttgatgaaccgctcagctcacagttagagtcttgaagctcggcaatccgatctctaaggtcatgttcagttttcctagcaagctctttggcttcacgcagcttggtctttggtgcttcaaaggtttcaagctagggaactatattttcaagagttg

SEQ ID NO: 78493 - DNA, 493 bp, Oryza sativa
  unsure (1)..(493): unsure at all n locations
cttgctcacatataanataaagtatgcactctatcagttactgttatattcatctntgtactgactattattattttattcatcttagcatagaatatttgtgtttagcatttcttagaggatactttatgtggatatgtctagattttaatatgcatagtgatgttattcttcttttggacacaaacatgcaagtagatatatcaagaggacaaatacatataaaatattcctaataaataatattccatctagtaaaanaatgttgctttggacatataacatattaacattcaatacttttagtaccagnatcttcaatatnttaattggtatgtctaagtcgcatttatatatttctctcatgtagtagctctctataatattataatatggtcaccaaagctggtcatcaattgccttttttctaaaatttatcagacgattataagttcattgcatataacctatatttgcaatctggatactgcaa

SEQ ID NO: 78494 - DNA, 265 bp, Oryza sativa
agcttgtatatgttaagtgtatactagacatgattagtatagaagtacagatgaattgtagtttcctaaagctaatttcctactacatattcttatagaggtggatctcctgtgtgtatccactaccttattaattattatcctaacccttggttagactatggtgaattaattataggctgattaaggagatacagaaaaacatatctttatgtcaccactttccctgtggaaatataactacaatactcttgggaatatttat

SEQ ID NO: 78495 - DNA, 333 bp, Oryza sativa
  unsure (1)..(333): unsure at all n locations
ctcttgggtcattccacatttntntctgtntcctagcccttcctatggttctccacctaaatattgatgttctatggagttttgagtttgatttttgggtggtggtgaggattggtgcttgtgagagaacttagatgacatgagcacttggggatcatcatcggctactgtttggtgcatattactcttgggggggggggtgacctcctagacggttagacatcgcccgcgagcttcctcaagttgtgaattgaccgcggcacgtatgtgatggtgtaccttgcctccctaaaggaagagaagtaactttgagtgaattctgagctggcagct

SEQ ID NO: 78496 - DNA, 243 bp, Oryza sativa
  unsure (1)..(243): unsure at all n locations
gagccacatagacaccaatcattcctgctgtcattgcagttaacgtagtgaactgaaacaactaaatggagtacagatctaatgccgagtttagttccaaaattattcttcaaacttccaacttttctatcacatcaaaatntttctacacataaactttcaacttttccgtcacatcgngtcgatttcgaccaaacattcaattttgacgtgaactaaacacaccctaagattacatatata

SEQ ID NO: 78497 - DNA, 471 bp, Oryza sativa
  unsure (1)..(471): unsure at all n locations
ttacttanggggtacttgcacaatgtataacactgtgttcataatatgatcaaagaacattcaagagaagtcacccatttcatgtataagtattactaacatctttagtgtagggcatctataaaaacatctctagtgtagtgaaattcaatagtacacccaataagatgactgcgcatgtgcagacacatcctaattagcaatagaagtgtttgcttttgtatgacatggatgaaaatggaggcttggagaaattgggttgattagacccaaagggttcgtatcttctgccttcggtctcaaacgcaaactttaccgttgcttcattctttcggcgatcaatagccgtatgcattggcccgattaaagtgctaattgtcaaagtacttaattagcagctgctcgtctggtttctttttccaggaataaaaaatctgagacacatcggtcatgaatagaatgcctaagcgc

SEQ ID NO: 78498 - DNA, 250 bp, Oryza sativa
  unsure (1)..(250): unsure at all n locations
agcttagaggaatgtttatctgtctatgaagatatcacatcacgtagccacttagcagttgtcatggcagaagtaactggtgtcatctgcacaatcttgattgagccctcattggcaggtgatgaaagggaactatgggcagccaacatattctttatttgtcttgtangagaggctagtgtttcaacacacgctgcaaaagagaaanggaatctgaatgtaaaaagataacatgtgtatttactataaa

SEQ ID NO: 78499 - DNA, 232 bp, Oryza sativa
  unsure (1)..(232): unsure at all n locations
aaaaactcaactctgcgatatgaagaatgcatgcccatactcaatattttgtgtattcccctaaatcttaagtctgtcaatcctgaggacatcaacaacccaattttcaaggttggaattgtgatttcttcggtggaactacttatgaaggcgataactgaatattgcttgaagaatacagatgacatcaaattgcctangaatgacagaaagagggtataagcacactgtg

SEQ ID NO: 78500 - DNA, 262 bp, Oryza sativa
tccactaaaattatataatcatcatcagaagaggtgacacacgaaaagtgatgtttattttaaatatacgagatactcttatcatttagtatttctgagatgggataaatgtttttttattataagataatatatagtattctacaatggatatgggaagttgacttattttattattcttttcatagataaataaataagatgcctaccttcgcctagaaaaaagaaaaatataattatatcttaatcttcagttatatct

SEQ ID NO: 78501 - DNA, 458 bp, Oryza sativa
  unsure (1)..(458): unsure at all n locations
tgtttctcatttctctttaatgagaagacatttctataacggagaatgaaagaaaactctcctagtgatgtcaccatatttgacacctagccgatcatatctgtttgagctaaacttcaactgttattaaaggctaagtcgggaccaggttcagcgtacaattgatattcccactgtctctcattccgatgaacaacagtctcctcagcaacctaagcaagttccctttcctgtcctattgtcatcagtactaaaatnttacattcaaacagactgatctgctgtgcagcttctgttcaatntggcgtgcagagatgtgctttatttatatatgaactctcttatataacagaccatcaacccaggagtgtntctccatgggtgtactactgtatgagagtaccatatgttcaattcatatcagacagcacgcacatatttgaagatagccctttgat

SEQ ID NO: 78502 - DNA, 228 bp, Oryza sativa
tatttctgattagctactaagcaggcaattaatgcggacaatgatgttattatgccacaaagagctgaacttttccaaaagcagttacaaaccacaataaaaaccatattttaatccttcttgttaggatttcataatatctcatgaatcaggaagctcttaaacaaaagtccatgttgtaccatttgtatgtgagatttgcgtctggggtatccaatacaaatacat

SEQ ID NO: 78503 - DNA, 482 bp, Oryza sativa
  unsure (1)..(482): unsure at all n locations
tatcagcctcattattatagtcaagtggtcatatgtttcatgacttatcatcagaggaatacatggcttggctatgaatgatgtgaaattttgtctacaaaagataacttatcaattatccactacttggacacatgactaatacccaattcaatactagcatcttttaatccattcaagcgtgcaaaaatgtttgatagaatgaacagaacataacaagctaatcgaatgaatatacaaactcaccagctgaagctagaattaagtatacccccatcctaatcttgtggactgtgctaaatagttgacataatagtgcgcattacccaccagctaggttcatatcatacagctgcaattataacaaacctttncataccattaagtacatatgtcggagatcagaaagatctgtacaattattccaagttgatcattaactaactcatcacaaggatcttggagacatacatacaacttta

SEQ ID NO: 78504 - DNA, 242 bp, Oryza sativa
agcattgctgatgtcggctagatggtgtttttgtgcatgtttgtactttgtggtagttgtggcggtgatgagatgtcgcatccttttccgtattagtttggctttgtagcttttaactatctgttggtgccctgggtcttacttttcttttatactggtccttttttatatcttgagatattgtaacacccgtaattattactaccaaataggctctccagtgcctttgtaatggttggatg

SEQ ID NO: 78505 - DNA, 485 bp, Oryza sativa
  unsure (1)..(485): unsure at all n locations
ctaagctaggcctgccaacaccaggaaaatagctttataccgaagtttcttctttgaacttttccgaagcgacgccaccaaggatatgttatatgattcgtctgcatgtnacacatgttggatcaaatatttaatgaaacatttgaccgtccaataatacgattcggatcagatgtctaagccgcacagttacctccgctccaaagcaaagacaccaattatcaatttctcatcattaatttatctatcgacctaatcacacatgcttacagagtcacagtcacacatatgtttcagtcggttttgccacgtcttctgcaccgaaagtgttcgatcccctcccctgatgtagcacgatcagagcccaggagcttcattcattcagcttatagctaaattactagtaatcctgaattcctgcgcgcttgctggccctactacagatcctccacagaccactccactgtcagcgtgggacccactcc

SEQ ID NO: 78506 - DNA, 220 bp, Oryza sativa
  unsure (1)..(220): unsure at all n locations
agctctaataaaataatttaatcacagntggctcaattagctactttagtacctgcaaatgagtctgggtggattccggagcaacccgaacccttcgttgaaaatgttaaggcgatcacaatgaggggaggtaagtccactcatgatccgccaaatcctaaccctgcagggactagcagtatcacccaggaagcatcatctggtaacaacgctgatgaat

SEQ ID NO: 78507 - DNA, 497 bp, Oryza sativa
  unsure (1)..(497): unsure at all n locations
cgatcaactntctaaaggcccaatcaagtctaacatcgatcggctcatggctcgcaagattgacctcttagcacaactcgaagaatgcaatgccgagctggatatggagcacaaaaagttagccgatctcccaaagtctattgaagaacagaaatcaagactcaaatcggctatcaagcatgttgctgatctgatcaagtctctgaaagttatccctagaaccgatgctcaagattcccaagccatagaggaagtagaacagattaggcagaaggctatatcggctatccagcgatacttatctcaataacccttgtgtaataggacttataaacttttgtaatcggctaagacattctgatactttactgccttaacaatcctttgtgccgattaatatgactctgaagttggctcannaaattntgactntgaaattntgcactgcattntgatatatatgtgcccgcctagttttacaatgtcaagagcattga

SEQ ID NO: 78508 - DNA, 188 bp, Oryza sativa
  unsure (1)..(188): unsure at all n locations
ggacacaaagcagacttctggaaagagagaaaaagggctgcatgctgagaggagactgggccgagagtgagaggacttttcctaattcggcccgaaaaggaaaaggtgagatttaattacttttccaattaaattaatcactgaaatgatctctgacatgtaaaaatacttncaatgctccaataatt

SEQ ID NO: 78509 - DNA, 410 bp, Oryza sativa
  unsure (1)..(410): unsure at all n locations
tttgtccatcgctttgtagtaagattcttcacgatgtgttccaatgattcttgaatatctgccagatgggtgttttaatatgtgcattgcgcttgtttggcaagccaaaatttctgtctagtaggactgagatggcttattacctgtttgtgaattagtggctaccatactttcttatgctagttaattattatctaccatacctagaagcaagcagtgttgcgaaaataagagatattctcgaaattgcttgagagtactaactactttatatgtatgtgtngtgtattccgttccttcctacaggttctcaagctctacagtgggcgaattctattgtatgcgggagcaatgtaataccgcgttattaaaaaaatatatacgtattttgtgtttgggtgacttgttaa

SEQ ID NO: 78510 - DNA, 264 bp, Oryza sativa
agcttgattagtttgtctattgccaagcaggacctataaaggttagtagtatgtggatcttggtaggcttaattatatcacaaggaatagcaaaaatcatacagaattgcgaaattgaataatagtccaaagtactagtcaaaaatgctggcctagcctagactcaatcctagctcaagcaagcaaatgatcaaacactcggactacaaacaactcgagtttatcacaccgctctctcctagaaaaccaatatcctataaaaaa

SEQ ID NO: 78511 - DNA, 465 bp, Oryza sativa
  unsure (1)..(465): unsure at all n locations
ntggctttggcctttatctatgctctggtcaaatatcccatgattattgttatgcttgcaactctcaagttggattttgcaatatatattttccttcattaatgtgttccattttatcttattttagggttcaaacttggtgttgagaagcacgtcacagaggtcattgtgaagaagtctggaaacttgctcataaattctggaatccaaggatactccctgctaaagacaactcatgtatttttgccggatgctaacctttcacacctgggttgcttgggttcacttgtaaagacagtatatgtattgtacttttgaactaagaataaacttgtaacaagtgctactacgcatgcttgaaggaattaaatgcanaaatgtgaggtatagtgctagctgaagtgtcagaaaagcaaaataatttaactagttaacttctgatgaagtatanacgaacgaaatata

SEQ ID NO: 78512 - DNA, 238 bp, Oryza sativa
agctggctcatctacagttatacatgagggcgggtgttgcggccagaagccaacaaggtgtggcctctctgatgttgtggtgtagcgcggacttgatcttgcaatatacccaaacaggagagtggccgctcccatacgcacaccacatacagacaaagcagcatgaagagtatagcgtgaggagaaagagaaaaatagagagaaggtgatggattctagtgaagaggggaaaaaaaga

SEQ ID NO: 78513 - DNA, 376 bp, Oryza sativa
  unsure (1)..(376): unsure at all n locations
ggcatngacacaccagnctctcgagtctttaccaatggagtagagcatacggaatgcatgagacatttggtgaagatcgttcatatgaggctcagtggtgaggtctttgacaggaatctgtggccctgatcaaaggcctatttgcatgacatattccaaagacactataatgagatgaaagaggcatgtccaacagcctcaaaatggattgataaccttcataatcacatttggactaaatgtcaggtctctactctcacgtaatgtgactatgctacaaacaatattgcagagaaccttcatatctggatcacgcatgagaacatactgactgttggtgatcttgatggataaattaggcaaagagtatggagag

SEQ ID NO: 78514 - DNA, 210 bp, Oryza sativa
  unsure (1)..(210): unsure at all n locations
tctctaggatgacagcacgaatcatgaagtggtattggccattataaaccaccgcaaattatgcctcttattgtgacccaaactatgcacccaaccacccaagggaaaaaaaaaccattttattnttcgaactatttcattggcttatggaataataaaatagaccttttttttctaccaaggattggcagcctatggcccacggcatac

SEQ ID NO: 78515 - DNA, 385 bp, Oryza sativa
actcagcttgagtttaagatcttcatgcttcttataacttcagatgtcatgtccattctgtcatcttttgctctcataattcctgcgtgcaatcatttctggattcttgtaaaaggaatattgcaaagcattattatggctgttgttgctattccagctaaagaacccagaccaagatttttcctaagaatataagttgctagtgtaatctgtataggcatcatgaagaccatgttcacataccatgcaacattaacaatcctctccatgtcaacactcacatagttaattatctcccctgaagtatgtttctgccttgactggcttgataaataaaggaccttctggtatacctgagatatcagagatgttcttaggcgccaat

SEQ ID NO: 78516 - DNA, 374 bp, Oryza sativa
  unsure (1)..(374): unsure at all n locations
agcttcatgtatatcctacgaataattaacgagatgagggtgtgcgcgaggatggctgatcttttatataaataatgcttcaggaattntaagtcatatacatgagatgtaaatttcatagatttgtattcctcccatgtgatttcagagttcaggtcgacccttcttttctgaatgttatcatgctcctcctgtaaacaacaaatcaatctcattttgttcaacaaaatgtatcctgaattatttgcatgtaacaatatgctggcctaaactatctattatttaaactaggagcgtaacactgcttctgtcctatttccggtgacttcatctcagttgcatcttcacatacgtttattactttactataacta

SEQ ID NO: 78517 - DNA, 249 bp, Oryza sativa
  unsure (1)..(249): unsure at all n locations
ggctgcagcttaagctgtgcttcaggccgaagccncttctgccattgcttgtgacatttggccaggtggtggagggtgtacatgggcagcgaccggctgagcctgcggctgcacatgaggggtcggatgtactgctgcggtcgaaggctgcccagcgaagtgtactggcgcttgcatggcttgtggcagaaggggctggattgatgcttacnggtagacttgnggtggaatgtactccgctgaatactg

SEQ ID NO: 78518 - DNA, 446 bp, Oryza sativa
  unsure (1)..(446): unsure at all n locations
ctctgatgcggaaatgcttgccaagaaagcagaggctgctcagctgtgcttgatgctagtcgagaaggctactaaagatagcgaggtcagaaaaatgtttgcctgccttccttttaagcatatattaaagcctcgatttcaaggtgttctcaacattgttaatctctgcaggctgaagctataaggaaaattttgggcctggattctgagaagaagaaagaagaaagaaagcaaaaggagcgagaagataaggtttattgcatcattcgatcatgctggttttgtacccttattntctctaatgcgttttagtacccttatcaataatagtacccttatcaatgtatcttctgctactagcttctgaactagactcttacttcccccttccaggagagagcagccagagcacaaactaattctgaaaacaccatcaggtgggtcat

SEQ ID NO: 78519 - DNA, 244 bp, Oryza sativa
  unsure (1)..(244): unsure at all n locations
agcttcatctnccgtttctgattaattntatattngcaagggtgagtaccaactgtactcagcaagccaccacagcaacaatgcatatgaaaggggtatttcaaaggatggctatggctcttttgcgctaagccagntntgtaattcttttcacaaacctaagacttagcatagactgatcaagttntaataccagtgttcacattanacaacgacggntctgtccaccatccattgtgatccc

SEQ ID NO: 78520 - DNA, 300 bp, Oryza sativa
actaatgggagctcaattaattaccttttcaacttgcaaggacacatcccactagctcgacatgcctggagccactacccaactttttaatgaacccacaatccctctccttccacatcagagtatcagactagcttattgaaatagaagtatctggccatgacgagcctatcatgcattttggacatttggcatgacatcttgggcgggaaagccaaatgcatattttatttcaaatattttcacatctaatatattttaatagcatttcttaattaatatgtaacgaactgctattta

SEQ ID NO: 78521 - DNA, 485 bp, Oryza sativa
ctcagcttcaaatttcttcaaaaagaggcgaggtcatgccaaaatatctatttattttattttggcgattacatacaaatcggaggtgcctaagaggtttgcaacttcatcctccaatgtgttttattgtcatgctacatttgcacctatgtgttgcacactttatttgtctccaaaatttaattgtaagttgatgagagagaaaatgtgtgtggggaagaaagaatatatagaaatttagttcattcgctaaacaagggtttataaaatagttgagaaggaaaactctagtgaaagttaatattaaataatagataacaaactaaaataaaaattaaaagaagtaaaacacattagaattagtttaaaactttacaaatagtgtttaagaattatttggcgtgatattttatgatttcttgtatgaataaagatatcttataactattgcatgactggcattattggaagaataattatatgtg

SEQ ID NO: 78522 - DNA, 170 bp, Oryza sativa
agcttgtgtctcattctttatgaacagcacataggctggcctctccgtgcatctatattaactggccctgatccatctcatcttgcatcagagcaagctcattactttctgcgaactaaagctactcttcaatgggaatggatttcgaccgagctagagagatttatagc

SEQ ID NO: 78523 - DNA, 466 bp, Oryza sativa
  unsure (1)..(466): unsure at all n locations
gcgaccttagatactcagcttaactggaataacccgttgattatgtcgngatgtactatatgtttttgctcgctcattaactcggngctaagtagcctcctgttgtatctgatgtccttctttgtcataccaacagggatacttacaaagcttgactactttcgcttcaggttgtactggcaaagtgatggtcagaaaaaaaaagtatcatattgctaaatggaacatactgtgttgccccaaggaacaaggggggttgggaattcatgatttggaaattaagaatatggctctgcttagtaagtgattaagttactctccacggaaggggcttggcaacagttgataagtaataagtatctaagtgataaacctctttctgaagtttagtggaaggccgangaatcacacttttggtctagcctcatgaaggtgaaacatgaatttctccattntggatccttta

SEQ ID NO: 78524 - DNA, 507 bp, Oryza sativa
  unsure (1)..(507): unsure at all n locations
accttgatactcagcttcttagcatctctcgatcgtcaaacggacatgcatgcgacgcgccttccacaaacctatggcccttggctggagtcaggcgtacgtgttatccggctntacgacttacgtgcgttggcgctcatgctgggtcgtcgatcgtgcaagtgttggcgtccttcgctcctctcgtgtctaactctattattacccgcagacgtagccgtagggccacacttaccgatccaatttaacgagactatgatgagaatatagtacatgtagatgtagccatgtacaatgacacggagaagacatgggccagccccggagcaagaaacgaacgaccgcgttctctctccgtgtgtcacatctcgcaacaggagtattgctttctcaaaccgacaggcgaccgccgaacagacaagtcgccgtgggtgcgagcaacaagccgagtccagcttgcgaacgcttcttgtgccaactgtcatgggatacacacgaacctacccg

SEQ ID NO: 78525 - DNA, 199 bp, Oryza sativa
  unsure (1)..(199): unsure at all n locations
agcttatacattgtctatatataaaaacaaaactagctagaatggtacggaaannaaatcaatagacaacaacagtaccgtactanaatatccacccatacttggcgaagaaattcctaacaactacctaccacaattcgcagtgcttgtgctataaagcaantatgggataagatgatgataccaatattggtccaca

SEQ ID NO: 78526 - DNA, 210 bp, Oryza sativa
  unsure (1)..(210): unsure at all n locations
tactccctcacttccatattctttcttagttgtatcggtaaaaaatctctgattatcctctcttactctttgactttgggacgagtgattcatataagtatacagaggacaacatttttcatgtgaactactattatgcctaaataatataattaattttatgtttngaccacaaaagagacacatttcagtgcttggacagacaaaaac

SEQ ID NO: 78527 - DNA, 462 bp, Oryza sativa
  unsure (1)..(462): unsure at all n locations
ntgtgtggctngaaacaagcacctagaacatacgatgatggtgcttttatctttntgcttgcgaaaggtttgcaaaacgctctttgttcttaagcatggtgataatcaactgtttgttcagatntatgtggatgatatcatctttggttgttcaactcacactttggttgtggagtttgctaagactatgcgcacgaaatttgagatgagcatgantgggtgagttatcgactttttgggattgtaaattaagcagacacctcaaggtacatttgtgcatcaaatgaagtacacgaatgatcttttgagacnggtcaagatggagaattgcaagccaaattcaacaccaattgtgtctacagctgtgttggatcctgatgaagatggtaaagctattgattaacaggagtatagaaacatgatttggatcttgtgtatctaactgcttctaggccagacata

SEQ ID NO: 78528 - DNA, 256 bp, Oryza sativa
  unsure (1)..(256): unsure at all n locations
agctntactgttttctgtgattggctatgggcctttcctgcgcagcttangtggaaggcgaagaaggcccccttctcggggggcccgagccatcagtgagataccactctggaagagctcggattctaaccttgtgtcagacccgcgggccaagggacagtctcaggtagacagtttctatggggcgtangcctcccaaaaggtaacggaggcgtgcaaaggtttcctcgggccacactgacattggtcctttaat

SEQ ID NO: 78529 - DNA, 243 bp, Oryza sativa
agcttaccgggtctaaaatggaacaaatatacctatgcctgctcgtcaagtacctaaccgaaagtccgaaacccagtcagtacttgtggagtatttgccaaacgtgacataatatatcaaattgatagttaaaaaccatcaacaaattcagagtttagaccatctttgcagcatcagcattcaacagctagcacaagcaatgaacatgtctgggtcaagtgatcctgacaattttgacaaatc

SEQ ID NO: 78530 - DNA, 465 bp, Oryza sativa
  unsure (1)..(465): unsure at all n locations
cgattacatggcggcgaagggatcagcgacatggatgaatgtgatttctctctggggacgaaggtcgntnttcatcggtcaagatagaattggagcgtcgttcgatgcggaggaagctggcctaaaaccgaattgcatctattattactggttgctgaacaacagagctgctttgtatgctcatgacatggaacgagggaccacggccgtgcacaatctatatccagacgatctttcctatcatctgtcgccagccatcacgatgatgcctaccgctcgctcgatgagtatatatagtttaattggacttacgcatatcctttntacagntctgtatacaagaagtaatgaaaacacagcatatatcatggtgcgtatcatatcaccacanatgcatgcaattcacatattataggtccttttgnatatctaaacatacctttgtgcttgggaatatatgagata

SEQ ID NO: 78531 - DNA, 260 bp, Oryza sativa
cgtctttatgtttcatggagatgacgctgtccagtgaagaatgtacagtttcacaagctgtctgcatgagttcatcagctgtcatatatgtgagctgatcaagaatctcagagaccatgtccgctgcagtgttctcacaagcactagtggaccatatcacgctgttcagatctatctcaaccagcctgtcgatgaactgcagagtgccagacacgccctggatgagcacctcggacttgttcatcacacatctgctcact

SEQ ID NO: 78532 - DNA, 265 bp, Oryza sativa
  unsure (1)..(265): unsure at all n locations
gctggtagatcntgacattaggcttgttgtgtatgtatatccttttcaatgactccgaacctctcgatgctgagcaaccatactggcctcttaaatctagagcccctcagttataccacctctgtttcttattatataccgtcgcttcagaatgacacgcaatgaaaaataggtgcaccctactattgtggattttagagggcccttatcaaccttacttttctagctattagtacaatatattttcgcgctacatttcttttta

SEQ ID NO: 78533 - DNA, 506 bp, Oryza sativa
  unsure (1)..(506): unsure at all n locations
cgaccataaatactaagcttggaatacccttatattttgtaatattatctcctttgaaaccttgtatctttgtatgcaatgaagatccagatcgttgaacatgtatcaatctactgatccacggcttgatacagtctaaacatgtcggnttccgaatcattagttttgggaccccacaccaaatttcttcctccttggcataggtgactttcaatagtccaccaaggagtgatggcaggataaaagtgacacttctttaccatgctgaaccttcccagaaagcttcttcgaccactacattctattttgcattgaggtaaagccagtatagaaacaacaagtattctcacccactttagcatattgctagctgtnttgagtactacaaaattagctgcgtggtatatatgtaagagtcaggttacagnttccaatccaaccatacgctcattcatttctttcttagaatggagatatttgtgtgggagcattttcagaattcgaac

SEQ ID NO: 78534 - DNA, 256 bp, Oryza sativa
cagcttgtagatatttgttagatataccagcgccacatccaaagctgtaaatggatgagcttaagccacaaaatgagcattacgactgaatttatccaccacaaccaaaattcagtcaaatgtagaagatttcggcaaaccttcaataaaatctgagagagaccgtttgccaagcatgatcaggcaccggtaatggttgtaattaacctggatacttcactcgttctgcctttgcttgagaacaaacagtacattc

SEQ ID NO: 78535 - DNA, 431 bp, Oryza sativa
  unsure (1)..(431): unsure at all n locations
tgctntcaaacattgagcatgatgaaaaggaaatatagccatgctctcttcatattcatgccaagaaaacaaaatggagagaatgtataaagaaaagggataatcttttctttattccaccattccacaaatattttacttttccattttctaccacaaataaagaccctttatctatgagtatgactgatgatctttntgagtccgtatttttggctttgcaatatatatgatgcaggtatgtcacaatttgtacctaccgagctccacatatcagacttagaataggggtaaattctggcacattttgccttggtgaggatcccaaaagagaatatacatccatgagagataagagagagagagagagtcaatattacgaaaggagtttgtctgcgaaaattcatcaaataatcacatgactttgacag

SEQ ID NO: 78536 - DNA, 426 bp, Oryza sativa
  unsure (1)..(426): unsure at all n locations
agcttaaggagttattggtggataactntatagtaagatatgattcgtacatccacatgtgctagtatgggatggcctaagctgattaatatatttaggactagccttgcattctggtaggccggtgtgtatgaattagtccataattctgaggaattagtcgatgattcagaggagcttcctatttgccccgacgtggtagtttaggtgactaagtctgtccaatacaaccgtattgtgccacgtgggtgggttcctgttgtgtccgccaccacngcgttaaatttaaagattgtatcttcttatattattatataccatatttatttcactatcattatttacacataacagtcatctttctctatcaattatctcctattatcttccctctcttgttatattattctgtctctgcctctcagt

SEQ ID NO: 78537 - DNA, 463 bp, Oryza sativa
  unsure (1)..(463): unsure at all n locations
aacaaagggtctgctgattnggagtaatgggttttcttaattattgcaattaatcaagtcttgcaataaagtcctagattttcttgatctaattgaagaagttagagctttatctctgatggaatggaattttagagaaattgtgaaaaaacagctttgaaacttttttcagtttggaagagtattggaagaaaagatgcacaaatagatggatccaacttggtgaatagaaactaagttttttcatgccatggctacagagaggtttaaaaataactngatagctcaaattaatgataatggatccgttgtctcagcacatcatgataaagcctctctcttttctgacacttttcaatctagaatgggtgtttctacttatcggctatgagttntgatcaatatgatcttattccaagaaatgataaccttgatagcatggtagaatcatttttcactcttg

SEQ ID NO: 78538 - DNA, 253 bp, Oryza sativa
  unsure (1)..(253): unsure at all n locations
agctntgcatctgagataattagttaagcaagctgcagaggtgatcctactgtttgagtagaaattggagctagaaaggggagagaaataataataatccggtttcgctttgcttgctggctggctgaggcgatagagctgtatggcctgtgagttagtgagtgagtgagaaaaatgacaggtttggttgagtccaagcagagccaatctgcaagccaagggcgcatgagcgttcacttnngatgtattcact

SEQ ID NO: 78539 - DNA, 315 bp, Oryza sativa
  unsure (1)..(315): unsure at all n locations
cgcaagctatttcaagctgngatctactattatacacaagggattattttgtgaaagggtnnttttattcatgtggaaaaatattggaggtaaacatggattaaattttactttgtattgtatttgaaggatctttaagattgcacatcgatcttgcttgatacggtttatggtttcgaaacgtgaagagaaccactcactaattgtccttttataagcacttgtgttgagagatgcattttgctagtgtggtggcaaggggtgcttggtttcaatcccgatgtccgtgttcaatccccaacacgcttatatatt

SEQ ID NO: 78540 - DNA, 319 bp, Oryza sativa
  unsure (1)..(319): unsure at all n locations
agcttaattctgtgaatcactnttatgcatatctggatctggatcctgcagaataaatatataggatgagtagtatctgatgcaaatataatactcgaggaaaattcaagtattttaaaatatttataaatatatatttcttctcttgtcaattttgatttccccgagcagatgactgcttacgtttaaacactctgtccgactagtcatagcccttaagcactgggagtcggnctangcactttccanacatgcatatgaatgacatgagttcggtattcatgtatcacacttcatcttccaactctgttatctgtta

SEQ ID NO: 78541 - DNA, 487 bp, Oryza sativa
tgcccgcaggtacaccaaacacacacttatcggggttcagttttattcgggcggagcggaggttctcacaagtgtgcgctagatctgaaagtaaagtttcttggttgcgcgtttttacaaccaagtcatcgacataagcctcaacattacgtcctatttggctacccaaagaaattcgagtagttcgttgaaaagtaagacctgcattctttaacccgaagggcattgatgtataacaataggttcctacgggggtaatgaacgcagttttctcctcatcctccctagccatgcgaatctgatggtaaccagagtatgcatctagaagacacaaaaggtcgcaccccgcagtggagtcgacggtctgatctatgcgaggcagggggtaaggatccttatgacatgccttgttaaggtcggtgtagtcgatgcacatccgaagcttgccgttcgccttgggaacgaccaccgggttcgccagccactc

SEQ ID NO: 78542 - DNA, 346 bp, Oryza sativa
  unsure (1)..(346): unsure at all n locations
agcttagttagatccaatccacttactaatcgctatatgtacatatcacatgcattattagaagaatatttagaatagtaatatgcctgacagacaccttggatccatcattgatgatttgcaatatagtacatgtactagttcccttggaaacacagacagaggcatgtgttaagcatgatcgctgcttccgtccaattatatatcatcgtaatattcctataatcctatgtctatgtgggggcgatgcccatctaatgaagcgatcacatgaatcantatctcttctcgtcctttatttcgtcgattgtgttttatttgaattatatatcacttcttttattta

SEQ ID NO: 78543 - DNA, 450 bp, Oryza sativa
taactctatctgacgatgaattataaaacgagcatgtccatatttctatgtgtattcagagggaaatacatcttcagtagtcaggacctggccaccaacaactgctattccgtccaattaagaaaagggtgtgtattctgaaaaaagttggaagtatgaacaaagttgggagtttggaaaaaaaagtaaaagcttatgagtgtcgaaaagtatctgatgtgatacaaagttgagaatatggacgagactaaacacggccaaaggtacaataaatagcgaaattcaaatcatcccttaagaggatatcccctcatctttacatgtcatgtacaaagtcatctaagatttctaaagaaattactatgatcgagcaatatgtgatatgtcattcacaaacatgcgaattcaattgtcatttatacaaggtagaacaacatacaaaattgacta

SEQ ID NO: 78544 - DNA, 229 bp, Oryza sativa
agctttctttatgtatatcaatttccttaaccgaatatagcaagaatccgataaatgacgacttgacaactctcatcggctaatctcaggacttcgaagccgatactgactctaaaccgatgactactccggtcttaccaaatttcactattaacatccactgatcaactattaacgcatgtgaagtgtacagtacggggtaggttaggttagtgaccggcgtaccatt

SEQ ID NO: 78545 - DNA, 270 bp, Oryza sativa
  unsure (1)..(270): unsure at all n locations
agcttatcttgtttcttgntcgcaaacattctcttcatgcgctccgcaattgggagataccacaccacctttgctgggcctcccctctttgacttacttccttcaccttcactctttgctcgtttgtatcttgatgccccacagatagggcagacatccaagtcagcgtattccttgtaatacaaaatgcagtcgttcggacatgcatgaattcttctgacctccangcccaacggacataatacttgcttcgcttcatatgtcgnctga

SEQ ID NO: 78546 - DNA, 479 bp, Oryza sativa
  unsure (1)..(479): unsure at all n locations
ngttgctgtatgaaatgagtcattagttgatgagctaaatgaagccttagctgattgcgattggaagccagaaattattcctggtgagcaatgtgtcatagaggtgagtttttcatgtcatatttatgtttaaatagctgatgctttgctgngaattttataaagattcaactctcatataataagttgctcgccacccagatgcaggtacagttgttactgggatagtaaggtgtgcatgactgaatgtaatctttctttttatattgcatattctttgctctgcttcctttaatattaggngttaatattacataaactcaattatctctttgatgtttcaacaagtatattcaagaatttattgagaaagaaatgaaaatatatgtgcttgacaatatattcccagtgtatattaccataacaacatgccatgttaaacatatagtactgagacacttggaatacatacgtcatta

SEQ ID NO: 78547 - DNA, 275 bp, Oryza sativa
  unsure (1)..(275): unsure at all n locations
agcttgccgtgattgctcatcttgcacgagaagtaagcatacgacacanaccagcttatggtggaagcctctaactntctctgcctataaataaaacccaagaggtctaagacgatgacgacctgttaatgtaaaatttttcaccgccaaacgaagccaaggaatatttgcattacttcagtgtaggtcttaaaatatagattcaaggcgtgccaactggtttgatcctgcaaccaaccagaaagacaacatttacaatatttcattggttgatg

SEQ ID NO: 78548 - DNA, 411 bp, Oryza sativa
  unsure (1)..(411): unsure at all n locations
ccctcctatacccaccagagaagtttcggctgtttatgttacccanatctcacctncactgcaccacataaactntctccccatttgacggcttgcgtcttcctcggctatcccgccaaccaccgtggntaccgctgcatggatctcgtctctcgccgaatcatcatctctcgccatgtcgtctttgacgaaaacgtgtttccttttgcagccaccaccactacctcgcctgatgaaacatatgactttctttgacatcccagcagtacctgcaccgctagttgcaacccaaccaacagcagtcactgtcatgccgccgaccgcgccgatcgcaccaaacaccgccactgcaccatctgcgccgatcgcaccatatgcttctacagctgccactgcaccatatgctcttac

SEQ ID NO: 78549 - DNA, 286 bp, Oryza sativa
  unsure (1)..(286): unsure at all n locations
agcttgtgcttntgtctgaacccctcctctaanttgctcttcaatcttctgcacagagagttgctgcacaaatttacgccactgtggctgcatttccatcatcgtcgtcggattatgtatgcttagatcgtaccagactagctctgttttttcggctacttcaccgaattattgtctctgattatttgcttatatcgnctctgaaagtatgttccctcacaaaattttcatttattatatcgttcggactatttgttaaattcatttcttaaaacatttaatttat

SEQ ID NO: 78550 - DNA, 445 bp, Oryza sativa
  unsure (1)..(445): unsure at all n locations
gcgacctatgatactcaagctattgtatccgcttgcaccctcacgtncttgcctaccaccctatctaagagaccacacatatatatgatatacatttatatagcacatcctatatcttcatcctaaaatataaaaaaaatttagctataaatataaaccatacatgtatccagatttatagtttaaaatgcttatattttataacgaagcgagtacaattttatctaaagaacgaaaaataacagataaatcactggtcaaagacacgtactctntgagttttatcgtgatctctgngtatttggtgacgaagtgatcgacgtaatcctgcatattgnggtacccaacggcgcaaaggaagcggccggcgatggacggctgctccgcgcataagatatgcgcctcgcagatgtcctcgatgtgtgccagtggcaccgaacctatc

SEQ ID NO: 78551 - DNA, 428 bp, Oryza sativa
  unsure (1)..(428): unsure at all n locations
agctnnttaattataataactataaagatatagcatgtttgcatgatgtttaaatgtgatgattgttagtggatgatgatgtggcatcttgttaatttgtggattagtggatgatgatgtggtatcttgttaatttatggattagtggatgatgatgtggcatcttgttagtggatgatgatgtggcatttttgcatgtcaagcttaaggagttagtggaggataactctatacctccaaatgattacctcttctcccgctctatgtctttcgatttttctcctttatttcacactgtctttactactttctctactctttgctcctattcttcttttctccacctttctgttccgaccttcctatttcctctactctttctctcttttctcctgtctttcctctcattatatctctgtctatccttc

SEQ ID NO: 78552 - DNA, 456 bp, Oryza sativa
  unsure (1)..(456): unsure at all n locations
ctctcttcgcatcatctctgcatcctgatgactgctttgtctctgttatgctttaatttcacacagaaacccggcgngagagagagagagagagagagagatcggtgggacaaccacgcgagtgcacgggaggggagagtggagacacggcgacatgaatcgaagaccagagaatgtgcgtggtggagccacagccacacacagccaggccaggcggcaagccgtgcttgaatcacggggcgctggtcccgtacgttcgtacgcctgcgcccctctgccggctctgacagctctggggcccccggccgggcttacagatatcacccacgccaatattcgcgcggcagccgaaccagctttgctttcatcgggtggcagttntgccttttaaaaaataaaataatttataagaaacttcttagattattctaatgactttaggcacctttaaaaata

SEQ ID NO: 78553 - DNA, 201 bp, Oryza sativa
gcttcctttctgtcttaccaggaacccgggttggctccaaccgacccctgcccggcgttccccaactattggcatgcgagggttccctgaaccgactagttacttatctagggtgtcccattccaccttgtggttgcactttgttatgattgatgaggtttccacaggaatcggtccttatatgccaataccggacagcgc

SEQ ID NO: 78554 - DNA, 440 bp, Oryza sativa
  unsure (1)..(440): unsure at all n locations
cactatanaanacnncaagctgctcacttaccgatcaaagtgtgttgagtatgatttgtgttctcttattatggcccatagttatgtgaggatttgatccttctatgtggcatgaggtcaccctgngtcagcttgggaaaagctcttgtgcgaaccttcgataccgacgggcgttcggaataagtgctaatcttgtgggtaatgcgacccctctgcaatgataactaactgttcgaacagccgtgcccacggtcatgggcggatgtgatgtggataccgttgcgtatatttgataggctgtgcttctggataagttgctgcggtgtgggaatcgcaaccacaatcatcctatgttgcacatggacgacctgagtggcaatatacaaactgtgtgatttcggatgtctgcgggcttatagactacgctctccgaatggaac

SEQ ID NO: 78555 - DNA, 328 bp, Oryza sativa
  unsure (1)..(328): unsure at all n locations
agcttgttcaatgatcactgtatagtaacagcaagttaaaactagcattgagtgcacatatctaacaattgccgcatctgcattcagcattgggactataattatatgatgcatacagnttgctataagaaaatgcccatacgatgcaagcagacaaatgtagaggctaacaaacttcaacagttttatacataagaagcagcttttcaccttcaatcaacgcagcctcaaatttctaataaaatgcatgggttcagatttcaattaagaccattactttgcatatatcgnatcaaccgctattaacttgaataacacactgtcatca

SEQ ID NO: 78556 - DNA, 444 bp, Oryza sativa
  unsure (1)..(444): unsure at all n locations
tcttcgctgcaactcgatgcccgcgtgccctcttctgaccatctgttggttgactaccactagcctccttctcctggttcccctccacatccctttccacgtgcccctgctggttcccctccgcatacctctacacgttcccttgctcgatcaagtactggtgtggatcctcgttcccctcttcttcattccagtactggctgctatcctccgcgaatatatcgtacaatatctgttcctcatcgcggtcatccatctgttgatacaacaaacatctgctaagtcacgagacatttatgttttaagactacaatagncaattgctacttgtcgcaccaattccgtagtcattatcacatactaagtctaattactaataaagtaatcttatatatatgatcaaataatattacatgctaagactaatatagtcatgtatgctaa

SEQ ID NO: 78557 - DNA, 265 bp, Oryza sativa
  unsure (1)..(265): unsure at all n locations
agctntntccattttttgttcatctacgttgacacataataatataggctntgatttcaaattatttcctgaagtcaagctgtctggagaacatcttgaaacggtattcaaatacaaaaatggcgatgatgtccgggagatagccaaaattaacattactctccaaaaagaagaagggtggttatataatttacgtggattggattntaaggggtgcttcttttctggacagaacttcagtaactatgatattaatatgtgaact

SEQ ID NO: 78558 - DNA, 340 bp, Oryza sativa
  unsure (1)..(340): unsure at all n locations
agctnggtttattttatttacttaccttnttactttgattntctaaactttattcaaattaatccaaaaacttgtgctattaattggataaatgtcttaactccctcctttcacttgtctttagatgccgcgctacaagcctgagntacttgttggtgttgagggatttgtccaagagttgcgtacgatgtcctttgccatatgatatgggactgcccctttttatgcccagattcctcatgatcgttatgaagataatagtctaatcacattcagcatcactgtgatttattaaatacgtactcatctctatatgtggtcttcacttactataatatat

SEQ ID NO: 78559 - DNA, 477 bp, Oryza sativa
  unsure (1)..(477): unsure at all n locations
tggcattcatagcagtagcacactgctggtggtgtggntttctctctttgaaagtggnagggttgtccttgcggagcgatatataccactcaagcatgaactgagtggcatcatcactccaagtgatatacttttcacgagagccaccttccttgctattatcttcagtacgatttcccatactgcatacatcatatgagaattgtaagtaaaacacttcatatgaacaatggtagtcagttaatacataaaacaaagattggtagcaatatacgttggtaactcattcgctggtcataacatcgnggacatctatgttgtttctatcattccacatctgattggcaatatcgncacgcttggctggccactcacgtacatcagcccctttgtcagtgacacagttactactccttggtaggcgagcataccacgtatcctcatcggagacaaatgcatcatgtccatcgtccaata

SEQ ID NO: 78560 - DNA, 260 bp, Oryza sativa
  unsure (1)..(260): unsure at all n locations
agcttaacaatggttacggacgaacatttgagttgatggatattatgactgaaaatcgaccaacctacgaggaattatgttgcctgttgttttgattangaagaaacatgcacccaaattcgcctcgacgagggcttgaacttgggtggtctgggcgtacatccacgccctcgaccaacttatgtcaggtcaatttttgtgtgtgaaaacataacctttgtattttattggttattcacatatctctgctattgtaattt

SEQ ID NO: 78561 - DNA, 482 bp, Oryza sativa
  unsure (1)..(482): unsure at all n locations
tataaaactcagctaaggaacggcgcttactgtgatgaacagaatgttttctctatttattntcaaacaaaatatatgagaaatatatgttgctccatcttaaagaacccagacatcatcaaagtacgagtaaaagggctaagaaacagtgtgccgtcaccggtattgagtactgacaagatggaacaccaagtcgttcagtgacagatgagttaaccaattgtgctcgaaagctagacaagctaagcgcaaaaaattaacgtactaaccagccgtaattaaaaaaagcagattgctattgtattaatggaatcagccactctgtagctatccctattggctaatatctacatgaaccactgaggcactgactctcgacaggtatgaattattagcaaaacagccaanacacatacttgagtcctacaatactactcgttggaatgcctaactntgatatacacatgctgtaacctatatat

SEQ ID NO: 78562 - DNA, 393 bp, Oryza sativa
  unsure (1)..(393): unsure at all n locations
agctntaataagatgatagagacacagctggcgcagctagctgcctttattcccgctaatgaatcacggaggattacgggacaactggaacactctgttaaaaatgttaaggcgatcacaacaaggggaggtaagtccactcgggatcctccatatcctaaccctgcaggaacaaggagcagtagcagccaggaagcgctgcctaacaacacggctgagacagaggaggtagctcagcccacaggaattgtgccacaagagtactgccacacgaagttgctaccatttcctcactaggacttgattacacgttctctcataattatctttcatacgctataacatcacattatcataatacatatgccaccttttacttcttcatccatctta

SEQ ID NO: 78563 - DNA, 476 bp, Oryza sativa
  unsure (1)..(476): unsure at all n locations
tatgtagttgcttagatgtgcttaccattcttgtcttacccataatagatactgaattctgaagatgctcagttataatgattcaacaatgtaaattttttcaagaataatagtagttagaatatacagattcaatttgggaatgcaaaatttgatattcttgcattcttgacgtttgagttgaaattctgaaacaaaatgaaactgttttagatcctccacctccgccgcttcgatcctcttgttctcaagcgttaaaagttaaaacccacaagatgatctattagctattcatcaactagccatgagaccatcactggatgattacacatgcagtctgccagacagtcactaactagttacatcctatataacaaaagaaacccacatgcatgcccagaccttcatgattgtaagactaagacctacgtgataatactgtatggatcacaaanatggcaattggcacacttctc

SEQ ID NO: 78564 - DNA, 280 bp, Oryza sativa
agcttcatcactattgatttcatttcgcggcgccctctatcctcgccgctcttcaagactaattctatgatatgcacaaatgtgtcatttggtgggctcgttaggtcagagcataccctcttcagtattgggctaacaccataattcccactttgcagatgctgaacagatgataccacattctcctcttcttccccgacccaagggacgggcttcaagtactctaagcaagacaaaacacatgcttggaaacctaataattctgctacctcgtctcata

SEQ ID NO: 78565 - DNA, 207 bp, Oryza sativa
taatatccgctgatttttgaatctcttcattaagaggataactcctgtaccgggcgtacaatcttgaataaagctctacttataaatatcttggctatactaaatcatccctcccttggcttttgtcatggatggcttgcctgtttgatctgtggtgacagtctgaactgtcacttatactggaatgctacgtggagtgtatacata

SEQ ID NO: 78566 - DNA, 229 bp, Oryza sativa
  unsure (1)..(229): unsure at all n locations
tactaagcttcttatcctttagatgagtaaacaaccccttttatatcaccattaaattatgattgatgatgctgccaaaattagtaccatgtgtgataaaatnttggactcatggataatattttagtttgaaagcaaatgcgctaattttcataaatactgtttgccagcttacagtacaagtacaggaggatactggttaataagacaactctatggtctgttgaga

SEQ ID NO: 78567 - DNA, 340 bp, Oryza sativa
  unsure (1)..(340): unsure at all n locations
agcttgtttttaagacttggatgagctgcaagtttgaaatgatgaatagaccgtttgaaatgatgaatagaccaatggttccggtactcattatcctgcataagatataatcatagcttctatgaatctacacattgttttgagtgactgagcgaccacatgctcacttgcagtagcggatctaaaataatttattgaccccgggcaagccactgacagatgactagtactacaaatgaaaatgaacttgtacaactctacggaccattntaccattgacacaagtaaaattaacagtacgagctaattggtgtaagagttaatatcgatatgacgatta

SEQ ID NO: 78568 - DNA, 270 bp, Oryza sativa
atagagtaggatcggaggatgagccgatacacgctagatctattctgatcggctatgctatatacatatataatcctggtattaatatatactgcgaactaagcgagatataatgtctcggtatggtgaccgatctatcccaaccactcgatttaagtatatattaatataagaactatatatcggtaggatctatagccgatcgaatagatttagatccctactatcaatttatgaccgctgatcgattctatttgaatcggctcaaag

SEQ ID NO: 78569 - DNA, 472 bp, Oryza sativa
  unsure (1)..(472): unsure at all n locations
ggcttatgaagtcacgatagagattaatcagaaagtatattgatgataagcagtttttcttttggtacttttngtgatttgagagtaaatntatttatatcatggtcttctaatgataagattcatttaattgaagtggttgaatttatcgctactctaaaaaaattcaaaccaagataagatgcttatatccttatatcagatgccttctttgagcgggacctgaatgcattcatccagaaattagaagtatctgtcagcgtatattttgcagacgaattatcttttacttccagtacaagtaaggttcagttgtgtctttgcagaagctggtgaacagtctgtgctttaaagggcggaagaatgaagataggttgcagatgatggtgcgtcggtatggtgttgtgctttcaattattggtaatttatacgtagtgttgtgaactgttagcatanttgtactggattggta

SEQ ID NO: 78570 - DNA, 271 bp, Oryza sativa
agctttctttgtgagttctttcaagaatgctctgcatgacatcatcttcgctaattaaagccaacagaactcattaatgcatagccaacctgccttgcagctcacgagagtacatgcatcttcacttagagagggtatagattggtactctcctcttatttactaatggtgtgttcttcccaagttctaattcacgggatcttccatcacatagacctgggtaccaccataaataaactacatggggctcaaacctatctcctacgatgca

SEQ ID NO: 78571 - DNA, 110 bp, Oryza sativa
tcttaatgtcattaaatatacagtcacccgctatctaccattttgtagcaagaagattggtaagaatccatattcttttagtggtagtgttaatcctaaggataaataaa

SEQ ID NO: 78572 - DNA, 382 bp, Oryza sativa
tcgcatcgtttctctttgcactacgtctccagaatctgactctttcccgccattcatgctcaccgcattcggcctctaaaacagcctactctgtatggccttaacctgctcaagctccttgcggaacctcatctcgaggtcctttttatccgaaggcgacatcctcggcagcatgaagacgtcccgcggcacattgaaccccggaagctcccctccatcctctgtcttcatgattccgcatttcctcttctgcacagcacacgagctccccgatacgatccgctccgggctaccgatacagaccttctatcccccaccgtctcacgccgtgccgttatccgcacgaaccgacgggtccccttgagaactttgcgtttcccat

SEQ ID NO: 78573 - DNA, 366 bp, Oryza sativa
  unsure (1)..(366): unsure at all n locations
agtcttctgctgttctattattnatttggccggtcagccagtgtaactaaagtagatgtagtttataatcgcttccatcttatttgtgtttgctatgtataactctgcttaatatgaaagtgtgaatctagtgcacatcctgaaaattagattcacatgagtatgagttaagaatatttgagatgttgtagatctttagccatttctgtcaagtcccctgaatgtgtaacacatcttgtcgccaccttcatatgtgttgacgggcacatctcatgctgaagttgactgcaggctaaaggcctatcaatgttttatccaagcaatgtctaatattcttctcttgaggcgtcggatgttttattatgt

SEQ ID NO: 78574 - DNA, 480 bp, Oryza sativa
  unsure (1)..(480): unsure at all n locations
gaacccacattagtgaactttaaactaagcttagacgtgnatatatgaatgcagaataacccctgcatatgatcaacatatgttgtccaatgtcatttctataaccccttaacatgcatctatatatggatagcatgttaaatggtggatacaaatgcacaacagaacatatataggaaaagcaatgtgctccaagttgttctcacctgagatgccaccttcataataaatataagtgagccatggacttctccctgaacttgcttaaacagtgctctcacctcatcatcattatgtacctacaaatccattaagataacatcataaccatcttccgttattcatttctttatgtgcagttgatattngcttatcattctgatagtgttgaactaaaagaataccaaccttgcttattcctttaccaccaccaccccatgatgccttgatcatatcatgatatcccaccacctgacaact

SEQ ID NO: 78575 - DNA, 322 bp, Oryza sativa
  unsure (1)..(322): unsure at all n locations
agcttggtgctctatcacacctatactaccagagattactttctaccatccctaaatgctactgcatttctactcgttttcttcttagccgaacatctcatcaacatcatcatgctgatcgatcgaatacgcatttcatagacaagagtagctagacaactttgagaccttgacaccaatgtcacaacagtgccctctcattatgggaaatctgatatccaaacatccatccaancaattcagattntgttcaggcaaatcttccttaccactngcgtacgaaggcataataactttggtcatctttcttgaagaaaaaaaa

SEQ ID NO: 78576 - DNA, 263 bp, Oryza sativa
  unsure (1)..(263): unsure at all n locations
ctgatcctgccataatcatttgttttatcagcctgacatgagcttattatgttgcataagttatgttgaagctagatcgaacaaaaaactcaaagctactgttaagtacaggatatgcaacagaagtttcacacgagccaaatctgctattagattaaaacataccaagagccttagacaccactaattagggtgattggtagtgataccgaataatctcagaagatgacattttggagaaaattatcgngtagtatacttta

SEQ ID NO: 78577 - DNA, 400 bp, Oryza sativa
gcacatgttatgttattcaagatgaactcccttgagaaaggagttcagcatcaatgccatgtttatactacctttttctccttttcatatatttaccttttatggtattaacattccttgtggtgctagttaactgtgtaacacttaattagcaatgaacaagagtcagcttccctgccagcagcaatggatgaatcaccaacaatgtgttgtttggtgcgtatccactctagtgttaatgctccatctttctgtttctgaaaatcactgcagtatatacaatcattctgtttctttttcttaatgaacttctgtattatctaaatgccatttatccctgcacatatatgatttgtgattcagtaccatcactgttgtctgaatacacttactactgaga

SEQ ID NO: 78578 - DNA, 453 bp, Oryza sativa
  unsure (1)..(453): unsure at all n locations
agcttggagttcttgtatatcaatattccagntgattntggctggaataggccagattttccccctgctagtangcgccatcaaaatgctactgtaggaactaatggtggataaataattggatatctcaaactcagttgtgggtgccattcttcaatcccattgctttgtatgtcattatcttttctatttaagccatgttcagttaatccccaaggagagggattagagaggattttattccataactatcgtggtgtggaattatcttcctcaatctcccttcagttccctccaaatcgaacaagcttaaggatcaacttctctgataactgaaacatacagaattgtgcaatcctacatgtatgccagcagtgccctttttctttttttcatatgctatngattcaacctactattaatgcangatcttganggatgtagcatcatttg

SEQ ID NO: 78579 - DNA, 365 bp, Oryza sativa
  unsure (1)..(365): unsure at all n locations
ctctagatgcttcaacatgtgttttcaaaagccctgcttgtgacttttgaaacctgatcagccttaggaaatttaaagcgaaaaatttcagttatctcccatgagaggattcacgcatgcagtttctaagaggagagagaatcaaagtgttgaaatatgtaaatcaggtaccagggaagttgcttgtcaatttgcctggtctcaaaagtaaaaagaatattggccttactgtgttgaanaaggagaataatctctactctctccatatatctcaatgtgcagaggatgctagatatgaacaggaacaattggaagtctgtgaaaacctacatcctcatccagatcttcatacattggaggtcact

SEQ ID NO: 78580 - DNA, 173 bp, Oryza sativa
agcttgcgaactggtatatgtgatttactgactctttgctcatttcatggtataattgattacttagtgtatccatgtgtttgttattcagaagttccagcattttactcattctgcacattccacttgcaaactagtagcgttttgttcaattcaacaatggtcaattgaca

SEQ ID NO: 78581 - DNA, 189 bp, Oryza sativa
actgctctctcataatgatttaacatatgcgaaacgatagatcacccttaatagtgatctccgtgactatctagagtggacaatattctaaacattggagccattacgctgtgtccatatacgccaacctgcatctttgatgcctaccaaacatgaagaacgttatgagttgtgatacttgctgaacat

SEQ ID NO: 78582 - DNA, 239 bp, Oryza sativa
tatgtgtgtagaaaagtcttgatgtgatggaaaaagtttgaaggttgaaaaataggttgagaactaacaagggcttgctccatccgtcggtattttaagtgtaaccataaatttccgcgccccactttgatcattcggcttatttgaaaatttttatagtcaggatatttgttgttatgagataatataacatgaatagtactttactcgtgacttatgataagtattttttttactcg

SEQ ID NO: 78583 - DNA, 220 bp, Oryza sativa
  unsure (1)..(220): unsure at all n locations
agcttgtatcatacatgttgcctcgctatctgcctgatcatcttcaccgtctgacatggntgctcccgtgccttcaccgagcgaagcacctgtccatgaattttcagttggtcatcttctttaatcaatttgattgataccagtctaccaaaaactaacttagcaaattactaaaaccctctcatttacgctctgatcgtgtttgaacactcaaagcttt

SEQ ID NO: 78584 - DNA, 303 bp, Oryza sativa
  unsure (1)..(303): unsure at all n locations
taacaatgggaaagggtgacaaaacgccttttgttcttaaacatggcgataattaactttttgttcagaattatgtagatgatatcatcttttggtggtcgactcacgctttggttgtagaagttgctgagactatgcgcannggaattgagatgagcatgatgggtgagtaatcgtactttttgggattgcaaatangccaacacctcaaggtacttttgtgcatcanacgaagtatacgaaggatcttttgagaccggtcaagatggagaattgcaagccaatttcaacaccaattggttc

SEQ ID NO: 78585 - DNA, 463 bp, Oryza sativa
tattcaccggattattaaacatattatgtgctccacacttttctgttaaaacttctaccacattgtgtagaccacctgttttaagctacagtatatgttaagtttatttctcagaaatattgatttacccctatattagagtagataatctgcaacaacaatctactcgataatctaaatcaagtagggctgaagtgctggtgtcttttgagctttggctgcaagcgaaacattaatgatcgtcagtcatggttatgtgtgtatggctgctgtacctgtgagcttgtttagtcttatgttgaaatgattatttggttagtctagtctctagtgtcctttttgcagaggtggtgctgccaaaatttgaattttttgtagtatatttatgtgtgtgctgttggtaggaattaggctcacaatctccccgaatctttctcctcaattccaattccattctttgatg

SEQ ID NO: 78586 - DNA, 318 bp, Oryza sativa
  unsure (1)..(318): unsure at all n locations
tgcatgaagcttctctttctttatagatagtggccccactgtcgatattntgttgcctatcattgtagcactaacataatgttaaaaagctaactaacctaatagcatgtggaacctctgnttcaatgaaacattattngactatgatgattgccctgatatttaataagcaaacggagaaaaaaagtcactgcattacaaatcgactttttaatattgcgttatccctttattttcaggtgcatatattatatataccttccagatcccaagtgcctgctcaaacagttgtgngtattctacagtatacattaaagt

SEQ ID NO: 78587 - DNA, 477 bp, Oryza sativa
actggatcgattttacagtcatatccacgtcttgtgccatgttctccctcaactatccatcatcactgcccgcgagaagcaatcaacactgatgtcctgacccttttgtaacattaacagatgtataggcctactctatttgagctcgttgtgttgcttatgctaatacttatctgtacttctttttaagtaataataagagtagtagaagtaaaatttgtatatacatgtctgtaacgattaaaaataaatacggtaaaataatatacaatataaaaactctataattgatattaacgtataaacatatgcctaaacgaaatggtagcattggatttgctcgtgtgtgtatatgacattaagtatagaaaggagcacgggcaagacatctatcgattattctacgttgtgttcgcgggagaaaggtgagtcattagcacatagttaattaatgtttaactgaaaccttgaaataca

SEQ ID NO: 78588 - DNA, 194 bp, Oryza sativa
agcttggctttctgttaacgactaaatttggtaatatcagtgtcggagataaagactagattgaagcggaattgaagacgaagtatgtccggatcggctacgactatgatcggctaagtctgagtcagactgggttaagtgatacagccgattctgacaatacgacttgtgtacgatatcgggttcgagttggt

SEQ ID NO: 78589 - DNA, 83 bp, Oryza sativa
gggatcagccgcccggatcttaatcacgagctcttttttgtttcacaaaaacctcataatatttgggcagacgctttgctcaa

SEQ ID NO: 78590 - DNA, 439 bp, Oryza sativa
  unsure (1)..(439): unsure at all n locations
cacgaccatccccaccatcagtaagcactctgttcatgtccttgttcttcttaatgagctgacttatctgtacgaaggtactatgctgcacatttatgttcaggaacgaacttttaattacatggagtgatggagtgagcactaattctcgttgtagaaacaaacttgaatgtatactctacatggagtgagcactacttctgttatgtagaaacaaacttgaatttaaactctagtaatgaggaatagtagcacgagcttgttcgtattataatcacatagcaaactntgatgttaatgtattggatatcactgtggctacaaataaatttactacttgagactttggttagtactaagccaagcatatgctactacacttctgtagctcttaatggaaacatctgtaagtctctatactcgtgattattcttaatga

SEQ ID NO: 78591 - DNA, 442 bp, Oryza sativa
gcttatatctgattgatgaattgttctttctatgccagcatggacgttggatgcccttatggaacggatgataagcattcaagctgctgcttgtggttgccaatttgattgagttcaggctcgtccattgccgatcatgaatggtaatacactccatggtggaacacgattggatgctgacccacaaacacaaaatattattccacccatggacgatagagcgttatctggcctgcaagcacgaatggagagactaaagagtgggtctatggaaccactttaaatacagtaattgtactccgaaatataccaatcaattgttattcactgtaaatttgcagcatagtcatgctgtttgtagataggcatgtcatacgtgcaacatgatgcatggctgacactttgtgagcccagtttgacaacccattcttgcaaaagtttc

SEQ ID NO: 78592 - DNA, 283 bp, Oryza sativa
caagctgaatttatgttatatataatatacttatgtaaagttaaatatatgtttttatagtttaatgtttccgtatttgttaccggtttccgatctgtaccgatatgtttccgtccgtattgttccgttttcggtttttcgatatttctgatatcgtttttggtttcgactttaccgtttccgatttcgtttccgagaaaaatatggttacggaaattggtgaggcttgtttccgatcgtttccgaccgttttcatccctaactacatcattgaaaattcaca

SEQ ID NO: 78593 - DNA, 336 bp, Oryza sativa
  unsure (1)..(336): unsure at all n locations
agctgaggttgatatctctgctgctccagagaaatccactgacaatagtgagcaacatctttacatgctgctatacctgaaagtcttggaccttactgaaactgcaatggaggtcattccaaagactctggggaatctgttatacctgaggatcttgaacctgtcccaaacaaggatcaatgcgctgtcaaaaaccatttgctatctgtggagcctcatattcttgctgctaagagagtgcacagcatngcatgtgttgccaaaacggatagagcatctgaaagggctcatagaccttgatcgtacaggtactgtgatcaaagacgcggcattcag

SEQ ID NO: 78594 - DNA, 478 bp, Oryza sativa
  unsure (1)..(478): unsure at all n locations
ctaagcttcccttattttctctactaatggaggatgcgtaaaatttgttgtgttcagagcaaagcccctatgttgacgaagtgaatgccagttgctacgtgttggtaacatatgtgtttgggctcatagcaaacctctatgtgactgtgcgctatgcttcttggcttgtatgctctgtactcctggtacttacttcgtcgttttcagctggtgctggtgctggtgctggttgctcctctgcgtcgggtgaagaatctatggcatcaacagaaagaaaaataagaggagatgatatcaaatcaaatgtgccttctaattgaagaaaacacaacactgccaaggctcttgagggaataccaaagagggatttggcgcttggtctcttatccttctacttcttcttcaactcagctgtgtagaaagtaaaagagttttanagactagaacatatattgcaactcaatcatgtgcctcaaat

SEQ ID NO: 78595 - DNA, 376 bp, Oryza sativa
  unsure (1)..(376): unsure at all n locations
agcttgtcgtatttttagagtcttggatttgtgtagcccccgactctttggttagttgggaaacaactgaacatagagtcgagaattgtagcttcttgtcgtcgagtactcattgcttgagtaaagatgcatgttgaagatgtccgagtagaaatattgaagattggaacaccacttgttgtaataaaataacacggcatcatatttggtgacgcatgccgagatgtcgaagctcttgtagacgtcgtggttggtgaagtagcaaaacttgcgaagtagcggcaatagagtttgccggtgccgaagataatgaagatgaagtcgctccaccatgatgantaaagtgcatagccatgatgaagtgaatacgagtcga

SEQ ID NO: 78596 - DNA, 441 bp, Oryza sativa
gccagtttcactgtttatgaacgaactatggaatgtgcctggagactacctgcattctgcaatagcaacacaccccttctttctacttgttcccgtccggcctaaaaaaaaaggctactaattgttgcgtagaccaattcctaatgtaaaaatgtactaacagaaaaggaggaagaggaaaatcataggaagctgcatgtgctcaacccgatcaagtaactaatagatttcagatactaactttgacttgacaggatggcatatatttaactcaagtacgtctgatgcacaagattatagacaagatagtccgttaaccaaaactgcgctgctgcttacaaaacaagttaactgtccagaatcaagtagtagtgatcagcatcgtcaggctgcagtttcttgatgatgccgatatgatgaagctcatcacgtatcgatctg

SEQ ID NO: 78597 - DNA, 129 bp, Oryza sativa
ccgcgatccttagagtcacctgacgcctgcatgcagcttctttgtcttttgattgtactacatacgatggtggagagatatggtatattacttattcccctcgaaggtgttcacacgtttgcacgcata

SEQ ID NO: 78598 - DNA, 123 bp, Oryza sativa
  unsure (1)..(123): unsure at all n locations
ccgggatcataagcgcctgggcagcagctttgtttttntttgangacccggcagttatcttggggcgcaacctttgaaagtttttttcatgacccaaggctcttctgcctttgtgcctcctgg

SEQ ID NO: 78599 - DNA, 128 bp, Oryza sativa
gctctcaaagtagttggtcctcaaacggcgacgatgactattcgatgttgcacccgcattcgctggtctatacgctattggggccctttcttgccggtgtcgtctcgccataaatagtgtggcggtgg

SEQ ID NO: 78600 - DNA, 242 bp, Oryza sativa
tgttttatgagatacagcactcttaccttgctatactcccagatttacatgacactgttaatacttcctccttctataataatgacggataacattgatatacttaaatattctgagtaaatttactttacaccattataaaaattagaatacaaaatggggctgataatacagatttgtttttataatataaatacagattacatgtagattaaggggctcgttagttccccaaaaacttt

SEQ ID NO: 78601 - DNA, 120 bp, Oryza sativa
  unsure (1)..(120): unsure at all n locations
aaaaaaatatcaaanaaataataaaaaaataaaaaaaaaggtgtgcctctctcctagcactagaagagcagcaaaaaaaaaaaaaagggatccagcgagcacaccacaccattccccctt

SEQ ID NO: 78602 - DNA, 345 bp, Oryza sativa
  unsure (1)..(345): unsure at all n locations
agcttgtttcttgtcagctggnctgcatctgagntcttaatntgtgatttgcgtcgactctctgtgacattgacaaaactaaagtgaacatacatatgcatttattaagtgtaattatctgtggcaccacaggcaactcatagagcggaagatgtcagaagcttccagatgaggcttcgttttcgtgaagatcgaataaaaagactggagcaagttacatcatggaagttatctgctgaatcacatcttgtgcaagaaaatgaagaccttgtgaaggaagtagatgctcttcgtggcctactggaccgcaatccagaagtcacaaggtttgctattgaaaactta

SEQ ID NO: 78603 - DNA, 176 bp, Oryza sativa
acgttcttgaaccgttacactacacacccgatgtcccctaatcttacaaaaccggacacctatagtccctcggcggttgtcaacacagttttgtccgacgtggctgctgattcaacgtgggacccacttgggccccacatgtaatccggtcacataagactcatacgttttcccac

SEQ ID NO: 78604 - DNA, 402 bp, Oryza sativa
  unsure (1)..(402): unsure at all n locations
agcttattccttctcttattgccccaaaaagatgcacaaccggttcacttattactagcagccttaatcatttgagcattagattaatcatactcatcagattgtgtttctactgctagctcccaattaatgtaagcagcggaatcatactntccatcatagactggtaacttacatgcaacttgtgcaaaattatagtcatgtacctcatatgcatcacgtgaagaagtcgccatatcttgtcgaaggtgtagatgttgacgatgagcatgaccatcttgtttcaccttgcgcaatcctgccatggttagcatcaaacaagaaacatagacaagaatatacacgctcctatcaactactatgtacttgcagctcatatctcacacacactcaagcttttac

SEQ ID NO: 78605 - DNA, 462 bp, Oryza sativa
  unsure (1)..(462): unsure at all n locations
tgttattacgttgtggtttaaatgaatgcgaagaagctatataattgaggtttttatgtgggcttaacaaagaaattcatgacatgcttgattgtcaaagatatacatctctttctcatttgttacaacttgcttgcaatgctgaaagtaaaatagatgaggacatgaagaagcaacatgctatgtttttgtcttctattactaatcatttgcaggaagtgcataatcatgaaaaggaggagagagacatgaaagagccgccagtcccattgatcacactcaaagtcgaggcacctccattatctgaagagggcatcaaaggtaaacttaatggtgctgaaattaataaaggtgagtggtgtgttaatgaattgaatntgtccacttttcatgctatatcagagcaaccattagtggaaccaactgctgagattcctttgtcacaaattgatttgttgctgt

SEQ ID NO: 78606 - DNA, 278 bp, Oryza sativa
  unsure (1)..(278): unsure at all n locations
agcttctgtctaccccaggtctgttaagtcatcctaatggtgttaagtatatgggaaaaagacaagtatgcccttgcatattttcccttcttttgacactagttctgtttttgcccttattttgataccaagcattttgacaagaactttgccccagtgctgacttgaatttcacatatttcaaatctgatcgagtttatttgacaacataacagaanttcatataatttcagcatcatttgcaacttcataatattcagcaaagcattgagcaacat

SEQ ID NO: 78607 - DNA, 82 bp, Oryza sativa
  unsure (1)..(82): unsure at all n locations
ttcttttctctggcggcctgngatgaagtcgtggagcgtgtgtgatggtgatactatcattaggtccattgatattgtcttc

SEQ ID NO: 78608 - DNA, 394 bp, Oryza sativa
  unsure (1)..(394): unsure at all n locations
atcttctcttttcttggtctctgcccgaggcatcgaggccaaccccgagaagatacgagctatatagcggatgcgcccnccatcaagcttatggatgtgcaatgcgtcaccggttgcatggccgccctatatcggttcatatcgaggctgggagagaatgcgctacccttatttaagctcctcatacgctccgggccgtttacttggacggaggaagctgaacgtgctctcactcaagttgatagcgtatctcagctctccaccattctggtcgccccggagccaaatgaacccttgctactctacttagcggcgaccccgcaagtggtattgcggcgttggtcgtggagcgcgatgaggacaatcctcattccgcgcacncccaccctgtact

SEQ ID NO: 78609 - DNA, 430 bp, Oryza sativa
tctcgttctagccttaccaggaacccggtttggctccaaccgatcccaccccggcgttcccaactattggcatgcgatgtttccctaatccgactatgttacttatccatggtgtcccattccaccttgtggttgcactttgattatgctcgatgagtttcccacatgaatcggtccttatatgtgaatacgggacagtgccacgcatgctcaacccccacatcgcgagttgtcacaattcattttatttttaaacacaccgacacctcatgtcgggttttcaaggcttctcatacccatttcccaattttcgacaatcaacggtgtatgtgggataattggtatacacactcaaagagcacggatatcgtagtaccacatgggtggagcgacaagaaatcagggtagtacagcctacatgaattagtgc

SEQ ID NO: 78610 - DNA, 179 bp, Oryza sativa
  unsure (1)..(179): unsure at all n locations
agcntgatctttcatttacaagtaatcctaatgtgggaaggtttggtcagggggatgcanaaatagtgcttcaggatccatttacgcgtcatggccttttgttcttcttccattccgtaattttggacaagtttttttggtctcaaaagaaaccagttggaaagggtccattggaccaa

SEQ ID NO: 78611 - DNA, 108 bp, Oryza sativa
gagttgtcaataatcctcttttatttcttggaccttattaattactctactttaatagaaatatcattctgagtaattaatatttacttcgtgagaattattctttga

SEQ ID NO: 78612 - DNA, 453 bp, Oryza sativa
  unsure (1)..(453): unsure at all n locations
agcttcgtgtatgtcttctattccatatatacatgtcagtacccagtggaggctgttgaggcaaccatcatgaatgccgtcatgctgcttctaaaccacccctctcgcttgagggtgtgtttagttcacgttaaaattggaagtttgattgaaattaaaacgatgtgacggaaaagttggaagtttatgtgtgtagaaaagttctgatttgataaaaaagttggaagtttaaagaanaagttgagaactaaaccaggcctgaaatcaagatattttgggatgacgtcatggctaanaatgacgagcaggcgtactatgctcctcatgtangagtaccatacatgctgcatgctgcatatgcaaaggaagatgatacatacatacatagtacatatatgtatgtacctaatagtgttagtaaggagatatatacctctaattgatacctcgact

SEQ ID NO: 78613 - DNA, 435 bp, Oryza sativa
tgggcagtttataaagtttcattattggctaagaagcaatggaattctagaacaagggaatttgttctttcatggcaatctgtcaaggaagttctgctgcagctattggcacatatgttgtagtcggtgcaagtgctgaagtgctattacttattggctcttttaaagacaatgacaagataatgctactccctgaagacctccttgatgcaagggctgctaaaatctttatcttaccttggccaccacccccatcaagtctggaaatgctatatattgagatctgatgggattcctgaatatcatcgacttgatatgtacgcaactgcattgtgagctctgaaagtatgtcatcagtccatatgtgtcctggtgccatgttctttacttgcatgtgcttctcatcaagtggaaatcaagtcatctaaacttctg

SEQ ID NO: 78614 - DNA, 275 bp, Oryza sativa
  unsure (1)..(275): unsure at all n locations
agcttccagtttcttccacccccccccaaccctagccatggcttnctcctcctcgcctctgccccttctctgcctnctcctnctcatgctgctcccctccccctccttctacgactcgttctccttcgccaccgattactccaacgcctncctctncaccttcagcgacagcgacccggagccggagctcgcgcgggagcctactttcctcgaggaggtcatcgatgccgtgtcggagaagtacgactgggaccccgacgcggaggtccgggtct

SEQ ID NO: 78615 - DNA, 92 bp, Oryza sativa
  unsure (1)..(92): unsure at all n locations
gcttttgttttttcaatnnntcaatncactagcttgaaatcttatatttctttgcccccattctattctcatggacctgcgacgcccgcgtg

SEQ ID NO: 78616 - DNA, 97 bp, Oryza sativa
  unsure (1)..(97): unsure at all n locations
ctgtgcttctaattnttagcggctctgtagctatgctccattatttagcgcggatgaatggctcgcgatttcctttggaaaggtacccatcaaaacc

SEQ ID NO: 78617 - DNA, 444 bp, Oryza sativa
  unsure (1)..(444): unsure at all n locations
agcttgtttgtactnttctggngaaagaatgattggtcagccatgaaactgttacctcatactcggtttcgcattaaaagacgttatggagttctgaaaagattcatgtatgtgcttcgtatgtgtctaaatttatatcaacgttaatgaatctaaatgagggatgaagagaccaaaacgtcttagaatgtgatagaatgtgaaacgaatggagtactatgatgcacatatatttgccacggtgatgtttactcccctgtccaaaaaaaaaagtttactaacatgaaacaatactttgtctgcattatttntccataagaataaaataataaaaactgctctttttttgtgatttattcttagtcaacaagtgcgatattttgatagaggaggaaaagtacggaggcaacaacagaagtggcagatctggtgagtgtacatcta

SEQ ID NO: 78618 - DNA, 455 bp, Oryza sativa
  unsure (1)..(455): unsure at all n locations
ctgtagaaatgttagttccttattgccaaaccatgaaattcctttatatcttggtgtttcaaatcataaactgaaggcgttattntattttattgtgcagttgcttgatgagaggcanggtgaaaatatctggcggtttcttcactcgataaatgagtacgcgttacctcctttaattttgtttcctagtcaatgggaatacttcatatcttggagctcatataaactacactccatcatgaggcatgacttaacagatgcattgaggaagctgcagtgtcgaacactgattttcgtatgagaaaactcgcaattccatgaggatgccatccacatgaccacatagttggacaagagatattgtgctctagttgaggtaacatatggatccaacctgtgccgttaacaatcaagacaaacttgaagaanaaaattgtactcanggtngcttcatg

SEQ ID NO: 78619 - DNA, 254 bp, Oryza sativa
agcttgttgttttttctaccacgctgaacccctcgcacgcggctatgtcgtcagccggcggctggatgtaccgcggccgggagatctcaccgagcaagttccacgcgactccggcgaagaacgggtgggcactgacctcgtcggcgccgtcggcgaaggcagacctcttcgtgggctccttgtggagcagcctcctgatgatgtcggtgagctccggccaccgccgccgaaagtcttgggataactccggctcc

SEQ ID NO: 78620 - DNA, 484 bp, Oryza sativa
  unsure (1)..(484): unsure at all n locations
tataacgtgtacggctagctacatgactcgagctcgatatgactatatgaatcaacaggagtcaatattcccggttctccctctcatccagtaattagaccttgtttttcgcttaaactgctttatccagtaagcagtgaccatttgcctctcgcttgtaggagcgtaactcgagatccctcacgcaacaacatgatccgtatctcatccccagccagagtaagttgttcgatggcagacacgtacgtacctgatgacattatccatctactacgaccagtggaagtaactgaacgaagcaatggacccaaaacaaattatagcgagacagcctgcaccgatcgggaaagagatacgtcccctgctgcttcngtgggcttcctggccacgacacgccgcgatcccacctccctcctcatgtgcaagtgcatcttgccgcgaatgcatccaccatccgcccaacatataatgctcgatcgatcgt

SEQ ID NO: 78621 - DNA, 329 bp, Oryza sativa
  unsure (1)..(329): unsure at all n locations
agcttttgttcttttattaaaggtggcaggtgtgtggtcatttttggtgttggtacctagttntgaagcttaacaagcttactgattctgttattttcttattttggcttttatgcagagtgtgatagcttgtagtaagtgaaatttttcatgaaggctctgtgatttaccgtataatacacattgtcaaaagtagataggacttttgctttgttactggtggattatgctttcgagtaatcttttaattgtagtgcatgctttgtacttgaacttataatacatcttgaattttttgtctatagtaaatcttggcagttttatttttt

SEQ ID NO: 78622 - DNA, 188 bp, Oryza sativa
cgctactacataaggttgaaatatacttgtaaacagtgaactgaactaaaataattgccacgggctcatttttgctaaacatggaatgaaaatattgtgggattcacatacctaattatcatacgtaactaaaccattttatttgccaccaaacttaatatcaactatgctccaccatatgaaataac

SEQ ID NO: 78623 - DNA, 340 bp, Oryza sativa
  unsure (1)..(340): unsure at all n locations
atcttcatgtattcatttatatccctgaacatatctgatgtgatcactgtgaagaaagcaactgctgcatatagagcatacttgaagggcttgttctctgntatactctggttaaatgggtgccccatgtagtttactgcaaaggttgcaacctggatcatcatgttcaccatgtatgaaactgtgttcacaaggtttgggtggaactctgaatcangctcaatgcactcctctggcatatactttggtgcttcattgacggctgagatcangaagaacaagtgcatggcatactgaccaagaatggaaaggaagacgtatgcacagaatatgtttggat

SEQ ID NO: 78624 - DNA, 397 bp, Oryza sativa
cttatttttttggaaaaaatgttcttaatattattcttttttatcaaatgtaatttagagtaaaaaacagtaagttttattatatttttcaagcgcaccgttcaccacaccggtctcggcggtctgcacaacttttgccctttgcttgtggtgcgcaaccggtcggtcggtcaccttgcaccggaccggaccggtccggtcgctggagtcgaagtggttcgaactccactgcgtcccgagccctcgaccacctccctcctcctaccaatcccagccatggttcgactcatcacaagcgcacgcgcggcggctgcggcggctgcgactgcggcgcggatgatatcgccctgcggaccgcgcctgatcccatcatggatgctagacctataccatcttc

SEQ ID NO: 78625 - DNA, 376 bp, Oryza sativa
  unsure (1)..(376): unsure at all n locations
agcttgccctctngctcaccgaacacgcacttgtcggggttcagttttatgcgggcggagcggagactttcgaaagtttccgctagatccgagagtaaggtctcttggttgcgcgtcttcacaaccaagtcatcaacataggcctcaacattgcgtcctatctggctacccaaagaaattcgagtagtgcgttgaaaagtaggacctgcattctttaacccgaaaggcattgtcgtataacaataagttcctatgggggtaatgaatgcagttntttcctcattcctcctagccatgcgaatctgatgataaccagagtatgcatctagataacacaaaatgtcgcaccccgcggtggagtcgacaatctgatcta

SEQ ID NO: 78626 - DNA, 166 bp, Oryza sativa
gacgtttgggaaatcgagcattgcatgacacatcatccttgagcatattgaatcccagcttataaaatattttgatttaaattattgcattatcgctttacttaaattcccgcgttatcactgttttatctaaccatgcctatttacctttgttatgaccttatta

SEQ ID NO: 78627 - DNA, 419 bp, Oryza sativa
  unsure (1)..(419): unsure at all n locations
agcttatcaatattctcgaagtttgggattatgatcattagcaatataaatctattaatcacaatcttgattgaacaattataattttataacaagatgtcacactattatacatatttctaatgccattgaaattcaaagtttcacgtgtaagaagaatttaattntaatttgattgtgttgcatattcaaaattttaactttattaattgttctatgtttctcaatgtatcatgtactagtaattgatactgtagtcaatatatttttaatgttacattggtttaaaaaaaataaaagtaagtttaaacatttaagaacgtgatgcaatattatatttctctaaagtgataaaacaatgcctgatttttggatccccggccctataattattgaggagacataaaccttttttaaag

SEQ ID NO: 78628 - DNA, 429 bp, Oryza sativa
  unsure (1)..(429): unsure at all n locations
ctgacattgaatgaagtccttatgtcgggttgggcacaactctcccctatcggtacacaactaatcaccatatgtgcaccacttgatgcccatacctaaaatccatgtttttccaccattttatttatcaaaatcacaagtattaaagttctgtccagattaattaaaaatttattttcatgtttgtaatgagcccataatgacaaggaagacaattctaagcatggctaagctgtatatagtaacctagtgtcaccaaaagtcatatataaagtggtatagtcatattggtcctaaggttangagtgagggatatggatatatgtggggtcaaggtgaatgcaaacaatangagtttgtcaacaagttaacaaaatttaatatattagtgacaatcacatgcaagatttgcatacatttaataacctc

SEQ ID NO: 78629 - DNA, 458 bp, Oryza sativa
  unsure (1)..(458): unsure at all n locations
cagcttaaaccttcattgactgcagntgaatatatatctgaattggtattatttgacaacgacgatatgagcgcagctgtcacggcacgtcttacaggcttgtacattagcacaaagctagccttaattattctatcagagacaaaagaagagcataaatttattaaatccttaatcagtttgataggtgtaccattgtaccaaacagacagaatgaagttaggacaaataagaatgaagttaggacaaggaaaanaacattagaacataattaattgggttaattatcataaactcaaaaaataaaattatctaatattttaaagtaacttttatataagaaagtttcacacgaaatatatcanttagcagtttggaaaagcgtgtaacggaaagataaatttgtatgtgaatatgaanagacgggacctaatctctcttatgtaacagttcttgcg

SEQ ID NO: 78630 - DNA, 173 bp, Oryza sativa
tatctgagacctaatgccctttctaatgaccgggagcacctgccttatatcccctccaaacacaatcgtctttccttcaaacggagaatgcgggccacccattatatctctcatgctcatattgatggccccaaccgctttgctctttgtcatggaagtctcatcccatatta

SEQ ID NO: 78631 - DNA, 318 bp, Oryza sativa
  unsure (1)..(318): unsure at all n locations
agcttcctatcttctttctctatcaccggatnggtctgcatatcaacgataatatgaaccccttcaacaggtcgtgcatagccattctcgatagggttatcactttcaggtctacagaacaccagaggtttggcgattcttctactgggagcatcagcatcactgtaatatcctgcacacccgtattcaagcagaaaaggaatatgtttaaggctctattgtcctgcacaagactgacgataatgtgatacacgctattacaacataatgaacaattactactaccatgattctggacagaccatgatcattctcttt

SEQ ID NO: 78632 - DNA, 435 bp, Oryza sativa
  unsure (1)..(435): unsure at all n locations
cagctncgacccgngatcctcttagtcacctgctgcatgcaagcttatgtaatattttctagtcccattgaataattgcaagcccaccacgttttgcttcagtggtcacatcatcaatcttacgtaattgtgtaatagaggagattgaatcagcaaatatggattataagggccccatggaaaaagaatggaatatggacttaatgttagcagcatggagcaaaatgggattggtttaagtaaatcaaattgttcaaagccttgtaacaattctggttgtacaagctaaatgtctgtatcaccatgattgttcactgttctttacatgcaaactggagactggtgagagctgataaacagagatcattgtatctcactcagagtgctaccagncaatttatagaatgatgatgctctcaaaacatttngtatcta

SEQ ID NO: 78633 - DNA, 141 bp, Oryza sativa
ctccgacgtcgcgtgaggcagtggtgtttgttgctatctgatcccgtgatggcgtacgagatggctcgcgcgcgcgatcgtcgtcgttggctcggttcgatcagcggttcaaccggagctcctctccatcacctggaggaa

SEQ ID NO: 78634 - DNA, 356 bp, Oryza sativa
  unsure (1)..(356): unsure at all n locations
tgcttttatcctacttattcattgattacccatatctcataataagataagacgaattattaacgaataaaaattaattaataagtaaaatttttatacatgtgttcctagcgacttaaaaatcagttatgaaaaataaacaacattgaaatatctcaaaatcaactttaaaatgaagattgaaaatttaaatactggccctggctttgatttattaagataaatataatgaggctccaagttggatnttgcaggtttccttcaaccttggaatattcaatagaagtttccgacatgtatgagtagttagtgctactatctattagtatttgagttttcacgttaggagtttcatc

SEQ ID NO: 78635 - DNA, 377 bp, Oryza sativa
  unsure (1)..(377): unsure at all n locations
agcttgctgttttatgtggactntcatatagttaggctcagcgctctagatcggcaggtaaattgcaaccgaaatttcaactggttgctgtggaagtggaaatacggattggctggatttggatgctaccctctagtcaccatattttagatctattttgaacccctgagtatctgttaaatgtatgtttggttcagtttatgactttgtctattgtctaaaaatacactgtaagacgccctccctgccgggacgtgcatattgtggncgtttgccttgtttgggcgatgcatggttagtgtgtagttcatctgcaggcgctgggcggagaagcatgagattcactctaattgggagaaatctcggctcacaggatg

SEQ ID NO: 78636 - DNA, 494 bp, Oryza sativa
  unsure (1)..(494): unsure at all n locations
gcttctcctggtggactctgactctcccctcccttcgctgctcttcttcttgcctanggttntggcgccgccggngatgtggacgcacgtggcggccggagtcccgggctcgggagatagggcaaaccgtcgtcgagggtgtgaattgttaatgggccggctgatgaggcttccctgcgcggccttgtcatgcccaaaacattggattgcacatggagtttggaaataattaatttggattgtgagaaacatacttaaatttgaaaataattaagtcgaattttacaacagtgatgaaaaatgtaatgcgtgatttttttttcatgtgatactgtagccatcagatcaccttgagattcatgtcatatgcaaggagtcgaactcctaacctccacaccgcgagattgcgggtgttagctaaccaaatcatagttatatataagttatatcatcataagtatagtttcagtacaataacaatgtattagatatca

SEQ ID NO: 78637 - DNA, 313 bp, Oryza sativa
  unsure (1)..(313): unsure at all n locations
agcttgttcattgttttgatccgaccggcccactctatctaggggaccagctcccgccccagcaaggctgggacgtcgctcctcctctggccgccgtcggggtcaccgggacccgatctggctggcgggaggccagatccatcgtcgagggaagcagatccgcatccggcatgggcggatccatcgtgccgaccatccggccgtcagctgctgcgacccgccgacgccgagaagcccccantgtctgccgccgctgtgcatcctcgtgggagagcttgcgccccgctgccgtcgtacttgcagccgtccggtt

SEQ ID NO: 78638 - DNA, 441 bp, Oryza sativa
  unsure (1)..(441): unsure at all n locations
tacttacggacactatgaatactcagcttcgtattacatattaaatgttgacattncatattttgtttcttttaagtgtcgactactataaagtttagattgtgatttatttgaattttgatgaaacttctctataagaagttctttttctaaaaaatcataatgttcagcggtttgataatcatttacacagaaagtacccaaaaaaactaaaaatctgaaagaacatggctaaagctagtaaactatatgtacacggcaatcaattgtcatatcaaatttaaatttatatccgaaagaactcagaataaagaattaaaaaatagtagtaacaagtattgtagttgaccgtaaatatatatatgaatacggtgcaatgtacatttttccccttttttgtatgtggttgcacttacaataaaagaaccagttggatatatg

SEQ ID NO: 78639 - DNA, 159 bp, Oryza sativa
agctttgactatggtttacatcggccgatccattggaagaagtagatataagtgatggaactaaaccaatgccgacttttgtacagaataacatgaaagccgattataacggtaaaggaatcgagctacttaaagagtatgttgattgctttgcatggg

SEQ ID NO: 78640 - DNA, 225 bp, Oryza sativa
  unsure (1)..(225): unsure at all n locations
agcttttgaattggacataactgaagatgagtatctccattntagcagtgtactgaattcacatttcagatccagatggttggtcatcaagaagaagcattcagatgaatttacaagaaataacaatggcacaaatgtgccaaaaataccagagacattggagacgattcaagaagaaacagagttagcagaagctgtaaatccaccttgcagtgtgttagctgt

SEQ ID NO: 78641 - DNA, 332 bp, Oryza sativa
  unsure (1)..(332): unsure at all n locations
ctagtgtgattttatacctatatganaataatcaatgacatatcccatataatagcatatagtaggtaaggtgagcaacccttagttaaccaagcagtaagtagaaactattcaaataaaggattcaatatattaagatattatgcacgcatatattgtacatcccattataaatatatggtatacgattaaattgcttatattaatttaaagggagtatataacaaacatgaatagtagataagtactatatataaatcttgacctcatatgttcatagntcaattgtaactccggattggtcattaagagataatctgtaactataatat

SEQ ID NO: 78642 - DNA, 448 bp, Oryza sativa
  unsure (1)..(448): unsure at all n locations
agctntgcccatcttttgtaatgccttccgcttgagcctatcctttgcttcggctggaaatgtgaaccatttctccattgccgtccaagctcgctctttctcggcttctgtgaccttcccgatatctttatggaggatcccgaagttctcacgtgccgctatcccgcagcagttagaccatcttccaatgacagtcctgtgcgccgtgggcctaccactagcgtcaacctctcttataacttgcactgtggtcggccatatattntgtgaccgcggatttctactagacctacttgcacttgtctcgcccgacatcgacgtatgttgttcctgcggcaattctgcagcacatacagaaggcaatatttgctaaggggtggctagctaaattatgtggcatgtggtngaaatttatctataaataccatgaatttcggggtgtgaccgc

SEQ ID NO: 78643 - DNA, 430 bp, Oryza sativa
  unsure (1)..(430): unsure at all n locations
taactcgagctattcaatctccgagtgatgatattttaaagattaacactttcccaactatagtattgttggtgtggcactgacatgccaccgtgtgcagtcaattggtcatagttccctcttttctctaacaaaatntacaaattcaattctttcattgtttgcgtttcacctcaattttccttttgtcccattttcatccctcacttgttgtatcgtcgataatgggccaactcgactcgtttgagctcacaatcgtcttatcaagataaccaggaaaaaacaagttgttcgtgttatactttgcgaattatgaactgatgagaatgtaaatcatttccaactgtcttcaatgggtgctaggcttctaaaaannatatgaatatactgattttgtaataatgtatggttatatacctgcacgggaaga

SEQ ID NO: 78644 - DNA, 312 bp, Oryza sativa
  unsure (1)..(312): unsure at all n locations
agcntcatacatctcttttgttatgatagnttatagagtatagtggaatagaaatagaatagaatcttcaatcctcggagtcttcggaagaattcgggtataactctagtagcttttccttcttttgtaagacttgacctttattaaaatatttctttatactattgggggattggattactatccgagtatatgaataccaactttattatatgcccgagttacatttatcatgatgctagcttatctggaagatgcgatggtgtgggattatgatccgatttatgatgactctttgtcttgacaatgata

SEQ ID NO: 78645 - DNA, 318 bp, Oryza sativa
  unsure (1)..(318): unsure at all n locations
gtcttaggtggagtcctggcttataccccatttgatcgcctgtgaagatggagccgtaggtccgctagtccgccgcttgttatttttgattgtcatgcctgaagcgcctttgtaataatgtaaatattaacgatataataaagatgtgtcttttatatcatgtttgtgtggtgtaccccggcttttcctgtgacggtgattaatacactagcgttcgtgaaaaggccattttccctgtcgcgacaagctggtatcagagccatctcgactgtangataagccaagtggataaaacctaanggacatatttataaatga

SEQ ID NO: 78646 - DNA, 161 bp, Oryza sativa
agcttcaatatctattttctttgcatcttgcacaagggtcattgcttgtggcaattttggagcatgatgccttgctagggagagagacactattctttaaggtttcaaacttctcttcaagagagaggtaagctttatccaagccatccactctctcttga

SEQ ID NO: 78647 - DNA, 428 bp, Oryza sativa
gtcctacgtacattaagttgttccattgtttataatgcaataataatgtatccatcctcaagttagactacaattaattgttagaaatttggtcataatttagcatattttaatccaaaattttatgacaataatcaagacatacacaatgagaagcgatctggtgatgaggctaaacataaacatgagcatgcttatggcaaaataagcatagacatcgttgacgttcacatagaatttcaatcctatggataacattgtgaacatgtaaataacaagaagaaaatcaaataagcttagaatcttatacccagggaatggtgcagaagatgttgaggtattcatattgcctccgttgatgttgtctcatccgttctctccattataagtgatcgtgaagcagatacagatgaagatgcaacgttatc

SEQ ID NO: 78648 - DNA, 373 bp, Oryza sativa
  unsure (1)..(373): unsure at all n locations
agcttcgcagaacctctatcgatggcggcagtgcactcaatatcctcttcgccaagactttagatgatatgcaaatctctcgctccgagttaaaaccgagcaatgcgccttttcatggagtaattccaggattatccgcaactccactcggccagatcactcttccggtcacttttggcactcgggaaaacttccgcacagagaatatcagctttgaagttgccgatttcgagacagcataccatgccatactcngacgcccggcgttagccaagttcatggccgtcccgcactacacatacatgatgatgaagatgcctggtccccgatgagtcctaaccctacggagcgacatcaagcaagctgtcacatg

SEQ ID NO: 78649 - DNA, 462 bp, Oryza sativa
  unsure (1)..(462): unsure at all n locations
attctccataatatgatagttgaaaatgagagagggtgggtttaaaattcctattgatctgaatgtggaccctggagcatcggttgctcttcctcctgaagtaactactgggcacaatccatgctttgatcaagtgctgcgtatgaaagctgcaatacgtgctcgtgcaccacattcccaactaaaaaaagatctggttgaacatatttggcaaaagtttatcaatacccgtcgtacttagttgtggtaagacattaagcatcttgttttcacattttcaattacaattgcaagcatcttaattcacttatcattttatttatttatttcagggacaatggaaaactttggtgctagctttntggtgctttctgctatggttttgagaggtatgtacatgtctacttgcactgtacagtccaaagaacaacataatcaaataagtcccttaatagtctactt

SEQ ID NO: 78650 - DNA, 190 bp, Oryza sativa
  unsure (1)..(190): unsure at all n locations
agcttatggtgtttgtatccaagtactcggtttaatttacatgcatgggtgacttatatcaagattaatatagcgcactaatagctntaaaacatatataattaatattatagttaattcatacaataggtacctgtgaacatatattacactattaatatctgggtccacctggtatatacatattata

SEQ ID NO: 78651 - DNA, 242 bp, Oryza sativa
ctaatgtgtctctcttacagcaggcacatctacttatctgacgctcaattgctgctttcaatcaccaaagtaacacttgtcacggatgatgtggcggtggtgctccgtgaatgcgtatagctcgttcgagaattcgcacgaaataatggttacatcctctatcattactaataaccattttatacactaacgtgtgaagcaatatgagagtgggaatcatttatcactgactggctggctca

SEQ ID NO: 78652 - DNA, 245 bp, Oryza sativa
  unsure (1)..(245): unsure at all n locations
agcttacatcttctccccttccttcagttgtatcgcccctttctccgagcgcacctaacacagccgtcgcattgactgtttcaacatcccatgggagtgttccttcatctctcaatgaaggacatggngtatctatcaagatagctgcaccanaggaagagcatgttactccaactatggaccctccatctaggtgtgagcatcttcctcttgagggtgcaccaagcaacctggtgacagataaa

SEQ ID NO: 78653 - DNA, 144 bp, Oryza sativa
  unsure (1)..(144): unsure at all n locations
acaccgtcacgaanaagattaaagagccaagttttttctatgattaacgagaatgttaccaagcatactatattatcatgataaccggttatacctgaactaacataggtattatagtataagtcatgataaaaacacaccaca

SEQ ID NO: 78654 - DNA, 439 bp, Oryza sativa
agcttgtctttcttatctgtaaactttctcttggagatcagatcaatggaaataagtgtatcatgctcaaaaaatggaaataggtggagtatcatggaacacgtttaaaaagataaaacatttcatcatacgtaaatatcaattgcccctacgcgttcatatatttcacactactgaaaagattccaaaatattttcctcatacacattagtgtgaactatgcgagcctgcggtacaatatctatacacagaaagaccgactctgacatgcgtcagtattactctacgcattcattgactacccctcgctatcaccacaagtcagatggctgtcatatacaattctggtgacagcataccatcacataatactgtcacccatgatattacaacagtggactttgacaatgattgttcttattattttaataagacatgt

SEQ ID NO: 78655 - DNA, 398 bp, Oryza sativa
agctaccgttaaggacctgatgcgacttaggtttttattgggaaaatggaaatgaagatgaagcaagcagcaatggaactccaccacccaatggagctactataccttttgattacagcaaacttaccattccttctcacaacttcgtctacgtgccttccgggcgtgctcctcaatttgatgggacatattatgccgcttggaagcacatgattgaagtgcatctaatctctttgcatccaagtatttggaatgttgtctgtacacgtattgatataccccatgatgacatggagctcacttcagagcaagaacaactcatccaccgcaatgctcaagcttccaatgcaattctctctcgcttgagtccggaggagttcaacaaggttgatggacta

SEQ ID NO: 78656 - DNA, 258 bp, Oryza sativa
agctttgtcttctctattattgccaacgaaagcacactctgtctatctgactcaaagatcgagctgtaccgactctgctgatagagctcaagctcctacagttcaaatacatcacctagaacttgattaaatctatgtgacctgaacctcgaacccctatgttgatatccatgggaccgacatcgaactcaccacgcacacctctcatattgatggcaagtagaagctactcccttcgtccagaaaaagacaaaccct

SEQ ID NO: 78657 - DNA, 207 bp, Oryza sativa
tcactcgacccggatcttaagtcactgagctgctttgtatcttgacgactgcagctcacctgcgacctttagtaacgttcaccaaagcatatttctaaatagtgtgggagatacccacgaataatagacaggtttattagccgcctaacgcatcatgatatgacttagattaaaccacaggacgatttgcgcttatatctgagtttc

SEQ ID NO: 78658 - DNA, 409 bp, Oryza sativa
  unsure (1)..(409): unsure at all n locations
agcttctctctttctataacatttgaaacaatcatcaattattttcggccaatgaaaccccactctcctagcaaccaatttatcttacgggccgattgatgaatttcacaaatcccttcatgtactactctcctagcaactttagattgatcattatctaagtaatactccatctatntttcggcgatataatatttgaacactngccaccgaatcttccgatcaaccttaagtgtaggatctttcaaatatctaatcaaaggaattctccaagctatttctaactcagggcacatatgtccgaattcacaattaattcggccttttaatcaattgtaatgtgcccccagcctcctgtctgtgatcggtcagaccggacacgcaattgccgtcagaaccgcctgtctat

SEQ ID NO: 78659 - DNA, 312 bp, Oryza sativa
tggtacttcatgtagcactaccgtaccacactctatcaatactatccgtcaacccgtgcgttgcacgtgctctatctatataatatatataagtatggaagttgtaatcagatgccgaaacgttgattatttatttttcataatatttctaaaaggcaattagcaggattgcccctacaactttaccttatttggatttttgattatcccacacaactctttattagatagatagataataataaaaatatcacgtattctaattatcttatagagaataattaaatttttgtattagaacaataaaatctt

SEQ ID NO: 78660 - DNA, 148 bp, Oryza sativa
agctttgggaattaattgattatgcttggaagaaataggtagaattacagtgataattataattggaacaaacagagacaacacaatgtgtacattgattctatccttggattaccagaaacggctgtaagatccactgacaagctaa

SEQ ID NO: 78661 - DNA, 334 bp, Oryza sativa
acactttaatactcagctaacctcggaatctttggcttggcacttgatccgactggttttcttcagtggctcctggttaactccgacttcaacttcggccgactggcttgcagtcgtgggtttgtcactggattttacatagtcgctggcctgcggattatcacttgggtgatcctttgcagtcagcccggtttcttttgatgaatccgcttccatgttaatctggtcagagtctttctcacaatgatctatgtcatattggttactatcagttttgctatcagtgttattttcatgacgggagagtttaatacaacgaacattgttatatgat

SEQ ID NO: 78662 - DNA, 210 bp, Oryza sativa
  unsure (1)..(210): unsure at all n locations
caacacagcctctaattctgccagaattatacttagacatgtaacgtatccgttgttgtcttttcatggttcaataagaatattacattangcatattgatggctcacctgtcaactctgaggcggagcgacagcgagtcatccagtgtctngaagctgctatagaaaggagagtatccgatgtaactggaccaaaatacctgctccttt

SEQ ID NO: 78663 - DNA, 352 bp, Oryza sativa
  unsure (1)..(352): unsure at all n locations
atttgctactttctttatatagcaggtaataacaacagttcattctttggccatgttatattaatgacaattagatatggttgaacactgcatggctactgtaaaccttaattttcacagntagctgattggttttgggatgaattaaagatgtttaatcaaagttnttaagaggttgtgccttgtgagtacttaaaatgcactattaatttcatgtcatacctacagatgaaatgctagagttcactgggatagcggaaatagcacacttttctttcatgtcataatttcactagtataggggaaatgcatagacttattgatatatagatgatgtcattgcaccattgat

SEQ ID NO: 78664 - DNA, 432 bp, Oryza sativa
ctaagcctggacttctcttcatgcacaagctgtcgatggtgctagattgtatcttcaatatctttgcgctcccggcgatcgactaatctctgcctggccttctccagcttgaattggtgttgctcaatgtagacggctggagtaagggcatcggctagttcatctgggagtagagcttggatatctgtgaaccttgctctgatcgagccacagttggtcaccaagttgtctagtgatgcttctagccgatgagagatatccttaagcgttctcttcacatcatcggacagaggagctatggctttactagtggtgtcttcctctgtttcatcgagacaatccttgatgtcgaaggaaaacagatcggcgaagacctgcaagagataatattatggatgggtaaggatcaaaacatgactagccgatctcaaa

SEQ ID NO: 78665 - DNA, 281 bp, Oryza sativa
  unsure (1)..(281): unsure at all n locations
tcttctgttccattgggttgtacttatcctnctgacgaatggccttatccaccaacttctggaaatcagaataatccccagtcattagcgggtaagaaagctcatcattcagtcctgccaagaaattctcttgacgctcttcatctgtgcgcacatnctncggaacataacgggccagacgattgaactcatgcatgtatctcgtgacagaacgggatccctgagtgagcgccctgatactctttctcttgagagacaccactctcgatggtacacgagtc

SEQ ID NO: 78666 - DNA, 332 bp, Oryza sativa
gacagctgtcacgcccggaatttctattcaaaattccaaacgcctacatgtgtgtgaaccctcgtccatgaatcatccgatgcacacaattaccaattgattattgatgaccattattacttcaattaataagccgaataaatggcattacagagggagatagttcctcacaatcaataaagatcttagcagcggaaaataaaattaacggcgcggacggctccactccacatgcagctttgacaatgcttcacctaatccttcacaccatcagcatcattgtagaactcttcctctgatgaatgattgcaaggtgagtatatgacatactc

SEQ ID NO: 78667 - DNA, 56 bp, Oryza sativa
agcctggattatgttctctctgctctgccacacggcactgcatgagggcagtacct

SEQ ID NO: 78668 - DNA, 221 bp, Oryza sativa
  unsure (1)..(221): unsure at all n locations
agcttattgcttcgtttatatgcatacaatgataaaaacattctgaanaattatgggaggtagggtatgatgtatctattaattctaccaaatttaattccaaattatgacttgtatagacagaaacaaataatgggagtaagatgatccgttttcaagtgaagcaatganatagtttgggggtgtatgatagactttatttctctatattcactgttacg

SEQ ID NO: 78669 - DNA, 414 bp, Oryza sativa
  unsure (1)..(414): unsure at all n locations
agctcgacccgggatcctctcagtcacctgctgcatgcaagcttatctcttgttcatctgataatcatatntactttgtcttgccccgcctgctctcccttcagatggtcaacaccaggaatggcagccgagcagcatgtaatggcagcagcggtgaaaaacgcactgacggtggacaccccaacagcgcctctagcaactgtccgtcaccgctcccagagaacccgacgctcgcacataatgatggcccataagacccagatgatggccgccatgatgcaacagatgtggcagcatcaccagcatatgcacccgatgatgcatcatctagccgagcaacggcagcagcggttaggtcctcctcacccttatgtcaaatgacggagttttacgcgtatgccacccatttctcta

SEQ ID NO: 78670 - DNA, 420 bp, Oryza sativa
acaacaaataacaattcatctttacaagaatgaaaaatatggtatatacatatatataaagggaaattatccaattaaccatatgagagacttgtatttgataggtacaaagagaacttgtgctgttgctgtggaagcgtctaaaacttacacatgcatatgattgactgattgctatctgatacaataaatgtgttaagcatatcgcaagcgcataccactgcctcctgcgtgcaatctgctgtatacgtataagctgcatattacctagactaggttgatagtattgcgctgccaccatgcatggagccgggatgacttgttgcgtgcctgatcaatgtgcgcaagtgctgagaaatctctcgtatttgatcgatgccatgttctccatcgatattcttgtgttctcccatgttgtac

SEQ ID NO: 78671 - DNA, 349 bp, Oryza sativa
  unsure (1)..(349): unsure at all n locations
atcttggtttattntatttacttacctttntactctgattttctaactttattcaaattaatccaaaaacttgtgctattaattcgataaaggtcttaactccctcctttcacttgtctttagatgccgcgttacaagcctgagtacctgtttggtgttgagggttttgtccaggagttgcgtacgatgtcctttgtcattggatttgggactgccccttnttatgcccagattcctcatgatcgtcatgaagagaagtgccgagtcatagtcacgttgcacagtaatagtgaagatatcccctcaatgatgtttgaagctggaggaagaaactacatccatgcatgtc

SEQ ID NO: 78672 - DNA, 432 bp, Oryza sativa
ttcataacctcgcattggcagtacacgctccatgatctttattcctcatgcactctatgcgtccatgtttctagcaatgagaggtgttctggcgctcccgggaaaaataagtctcacacacatatgaaattatggttcaagttaagttctctctctcacacactcatggcagtcctaccaatggcgacaccgatgtatggcacgcctctcggacctacctcaacggctgtcccatcgtatcgcacctgcctcactcatgggtgaaccatctattgcaaggattactgctccgctcggctatctaatccgctaggtctatacccattcgagaagacggttgtaccgtggtcgttcatgcttacttatggctcgtccttaatgaccgggacggactagcctttcagatacatccaatcctcgccgcccatcgaa

SEQ ID NO: 78673 - DNA, 346 bp, Oryza sativa
  unsure (1)..(346): unsure at all n locations
agctttgattttctccatcagnttcatattataagttgtttgcctttntcttagccaaacatctttaagnttgatcaaggttatagaaaaatgtaataacagtttcaaaacataacaaacatattatcaaaatatatttaatgttaaatctaatgaaactaattcgatatcgtagatgttattcatttttttatataaactaagtcaaacctagagatgtttaactatataaaaaaatcaaaccaacttataatatgaaattggagggaggacanagtattacaaatgggaacaatgcatcaatttgtaccgcactggcccacatatatataggccaataaacctt

SEQ ID NO: 78674 - DNA, 215 bp, Oryza sativa
agctcaatgatcttttcttgtccatcttgcccatctcttaagaacacatgctagcacaagccacgagaacacttgagaaggttatttcccctggactctgccctgaagctaacattgcatggaaagattgtaatgcatcaataaactgtctattatgggcataaccagagatgattgaattccatgaagcaacattccttgcaagcatctttttg

SEQ ID NO: 78675 - DNA, 371 bp, Oryza sativa
  unsure (1)..(371): unsure at all n locations
agcctgcacctttcttaattntagaatcctcaagctctgcttcacattggaagttatcctaagaggccgtcgctcagaaacctacacataaatatgcagcgtgtcatgtgtgatgacgcaaagccataaagccgacctgttacccatgggtccaatacaagatcttccatttggtgataatccaacaaatgtgctattaaattgagaatgtaccacactaaatgttctgattaatacaacaaccaaaaatacataactcaatcctcatgaataaactcttttttttggcatgggtgagcacgcacagcagccgtttttcccccttcatgtgggtgccccagaaatttgtgaagcantgattcgtaactgat

SEQ ID NO: 78676 - DNA, 417 bp, Oryza sativa
tctcgaaaggtccttgttaatattgttctcccttgattttctcctgcccttctgcttgcctctatcggtgtactcatcaccactatcattatcttgttcgtcagatggaggttcaccaaagtcttcatccatgatatcatcagcggtatgctcaggtatcccatctttttgtaattttctcctgtttcgtaatttcattgatgttcctgtttctctggcatccctttctggctcttgttcaataacatgatcatatggctccccctcatggtattgattctctgggtcattacattcttgatcatctggatgatgttcgccactaatacagatctgataaaaacggacagcttaagagatgagaattgcaatgtttaggcaaagagactcaatcaagtatatcatgccagtacacac

SEQ ID NO: 78677 - DNA, 214 bp, Oryza sativa
  unsure (1)..(214): unsure at all n locations
agcttcattgcttatcactttttaactgccagagcatantttctaacaatatttgttctgagctcttctttttctttgtcttgcaaattggatcactatacaagccatggaaataaagatcaacagattntgttaccttgcgtaactcgacgtctggtgacagtatacgcattaattttcttgcacggaagaatcaaaacaagttgaaaaaatg

SEQ ID NO: 78678 - DNA, 401 bp, Oryza sativa
atgctttttctgctctcctgctacatcacttttgaaaatatttaagtaaaaatggaagcttcatatagagtttgttccgtaatatataccgtgctctctgtgacaactcggaaccttccatgtatagaaacaccggcacctccacccatgacaattccagtgagaagtgaaacctagataagagtgttgtagcattcagtggtaagcattgagcaataatgacaataacaattatgtggacatgcagtttcaaagcaatagcgatagctcacctgagggttggtatatgttgcaatgatatagttcaacagaaattcatttcggaaaaaatgagcactatatttccagctatctgatataagaaatgcatagtagaactaatcaaatgtcaagaacaaaat

SEQ ID NO: 78679 - DNA, 87 bp, Oryza sativa
ttttttcttttcaatgcacccctttaacatattgttttacaccgctgggttatcacttaatatattatttacattcacgccaatatt

SEQ ID NO: 78680 - DNA, 166 bp, Oryza sativa
aaacaaatatcacactctctgacccaaataacgctcattcagcatacgctatgactcgttaccgaatccttcggcgagaaataataaaacaccgctaaatcgatagagtatctccaacactcattcgataatatgccgatgactgtacgatacccaacacgatgta

SEQ ID NO: 78681 - DNA, 357 bp, Oryza sativa
  unsure (1)..(357): unsure at all n locations
agctntttctattttgtatatctggccatgatgcttgtgtgttgatataccatcagttacagaacttagtggacagtaaatcaccacattagttcacctagccacttgctcaccacattatgtacagaacttaagtgctcgtcgattagtattagaaacaagaaaatgaggttcatcactcagtatctttatgccttttgttgttattggttcagttacaatttctaatcttatgtccctnntggtgtgaaatcacaggcatgttgttggaattgatattgacccgcaatcccttgaacttgctcaagaaaatgctgcagatctagaggtatangcattttttggttcccgaatata

SEQ ID NO: 78682 - DNA, 413 bp, Oryza sativa
cgttggccattcagcaatttgctgctttctctttcacatctgggtgtgaaatgtgagccccatcaccatattcgcagcaagccttattcccatacttcatgcctgaaaccatggtcaatcagatcagtatcacaacaattgctgacaataagcaagattgattcatgtaatacttgaaactgcataatgtaccactactagagagcatataccatgagctttatgatggcgaaacagctcgagcgtcacagcgtgtttgtcaagatacacaatagatgcatcctgcagcttcttcctaacctccggcaagctattgtcagcatttcattgaataggtcactgcactgtgaggtttcatgcaccaatccatcatgaatgctggatgcggagttcgtaggatgccggtacatcca

SEQ ID NO: 78683 - DNA, 368 bp, Oryza sativa
  unsure (1)..(368): unsure at all n locations
agctttttatatagttacaacccactcaatccaaagcttaacatacaaccattctacatcatcacccactagcaataattaaatatttaacctcatgagaatatgcaatatcatctataatctatttaattntacaaatcaacatacaaacatatccaatcatctcttacatcattgntacaatattgtaataaatctatctatcatgtttataatatttaacatatactcatcaacatgttccacattatagcgcaggcatcatttgtttgttcaggataaggactggataaacactgacatntcattattttntctttttactcctatctcaattgttaaaaagatattgaaattacttataattc

SEQ ID NO: 78684 - DNA, 493 bp, Oryza sativa
  unsure (1)..(493): unsure at all n locations
tgcgaaagaacgacgagacaacttggaatgtgagcagtcagcgatcaatgaatgcctcttatctaacactagcagccatctcctatcggcaaaaattgtttgggcttatttatatacgatcgcttaattaacctgtggaaattaaacaagaaaattacagctactacacgggtcaaccaagtgcacgtctgtgccctgcatatcatatctggctttattaatccaaactctaatataatgttggtacctggacggtagtacttggttctagttttctcgcctgtcgactttggagaatgacgtacaaagacggtaacttgtaatctatccaacggtgtgttagactttggatcttgttggttttagtcggtatctgaatatctgatagcgagagtcatcgatgtanaactgtgtctgattctgaaatgatggctcgcgtacaggtgaatngagtcagcatctactattcattgcgacatcgctctctcccaat

SEQ ID NO: 78685 - DNA, 234 bp, Oryza sativa
agcttgttctgttgttataagacccctgtaagatgatgcttgaatctttgtgtgattttatcttcagttttgcatggtctaaaaattcgagccacccactgaaccctggaataacataactgcaccctttagctttaaaatttcttgtaggtcttaagacttgcttaacaattcctaaatatttgaggggggtagataacctatacagaaacttagttgggcaaaattttcttt

SEQ ID NO: 78686 - DNA, 330 bp, Oryza sativa
aaaaaaaaaaagagatgtgaactcatacgcctaaacaactcgcgaccaaattaactgcccaagacctacatcagcccacaaaacgaaggccacagcaccaaaaagacttcgagaataagagaaacatgccacacagggacgagccatcaaggtcaaagaaggcccgcgtgctgaaaggcagatccccataaaaagaggggcacaggagaaaaaacgcgggaaggcagggaaaaacgaagcatggcggcgagccgaaaacccccgggcagaaaaaccgcagcgccgactaccaaagaaacaaggacacccgggccgaaaaaaagaaaggga

SEQ ID NO: 78687 - DNA, 194 bp, Oryza sativa
  unsure (1)..(194): unsure at all n locations
agctttccctttttcaaaataaaactntacgcagggtctcagaaagacattgtcactagtattttttacttaaaactcattccacaccacagtccacacaatcaaaacaaggaccctatgattaacaagaaaggaacaagagaacactacaaagtgatcagttagaaacaatgcagaaacttttggcgtcattt

SEQ ID NO: 78688 - DNA, 309 bp, Oryza sativa
  unsure (1)..(309): unsure at all n locations
agcttgntgtttcatgcaatgctgatgcttatcagagtgcttctctcccatcacaaagaagttttatgactgaactgactcatataatgacccagctcgccgcttttctcagatctagtggagcgccatttgtggtcaatatatacccttttctcagtctttatcagagctctgactttccacaagattatgccttcttcgatggatctactcacccgcgtgtagatggtcctaacacatactacaatgcttttgatggcaacgtttgcacattaattgctgcgctgggtaaaattggatatggacagc

SEQ ID NO: 78689 - DNA, 373 bp, Oryza sativa
acctgtcgtcgtatcacattgctatcattagtagagtgagaatgagaatcatgccacttacaatatgctcgacgtttaactcttcttgtgatggtatgacatggccattacgtaatctaatttgtttctcttgcaaaagataatcaaaaatcttatcacacttggccacgtcaaatctatatgtaacctcactctgccgatctttgcgatgagtcggcattatggtataacaaacaaaaggtttatttttgttagtccatgaccactatgcaacattatatcatgataaccctcttcttcactatcactagcatcagagtaatcaactacattaacattatgctgtttgtcgaatggtctatcaaatttttta

SEQ ID NO: 78690 - DNA, 322 bp, Oryza sativa
acaagttcatgcaagggtgtgtaacgagctgagaacctttcagttcgcaactgtcagagacgtacacccgttcaccaagaactgcactagagcacaatcaaagttaattatatcattccgtctcgaacctgatcatgctcgcaaagtccaaatgaggtttgtaagtgtaaccatccatgtttcgccggccggccggtcgcgagtaggtctcccgactgagaatgatgatgagaaacctgactcgagcactctgcactactcatcaatctgaaaatcgagaggagggcgatacttggacagcaactcaagactgaccaaatcg

SEQ ID NO: 78691 - DNA, 432 bp, Oryza sativa
  unsure (1)..(432): unsure at all n locations
gttctgtgcattgcaacaaggaaccaggacggttacagagtacttgcacgagttcaaccgccttgcgtgcttctctcccgaagacgtgcataccgatgctgagaagtangaganagttctgtttggtcttgatgatgagttgaccaaccagttgatctccggagtctatgacgactttgagaagcttgtggacaaagctatccctcatgaagagcaacgcaacaaattagaccgtataagaaaggtagctcatatcacgactcctcatgggaacgatcataagcctcgcttcatgatgggacaacatggtgggccttccaccctgatcgtctgacagcaccgtccctactacccgagtaacttctacaacgactacaatggtggcagcattacagaagtgagcatggcgacgacaactcacttcccacccat

SEQ ID NO: 78692 - DNA, 443 bp, Oryza sativa
  unsure (1)..(443): unsure at all n locations
tntccaaaagccacatgtgtgttaccaaatgagcctttggctttcttacagctactcttcaaaaagtcacagcccacaacagctgtttcaaaggccacagcctaaccaaacacaccctcaatatgcattcattctttgcctaccgctggtagttataagtactcaaacaattaaatttctctacatatatatgggtaaccaaagcatggataaatagagccaacacacgaagtagtccactcctccgagaaggccgttagttccatccaactgataatggcacgagcagctttcactgacgtgtagctatagccattgacaaaaaacttggcaatcagcatggaatgcaaccgatatcaggttcccagtcaagaaaaattataggctcggtaccaactgcaaacggtatgactgccatgaaatggaactcagtatcnggcgtt

SEQ ID NO: 78693 - DNA, 410 bp, Oryza sativa
  unsure (1)..(410): unsure at all n locations
tatggctcaacaacaagaannaaaataataggctaaaactaatatgacttataaaaatacaaggactntacacttgtgggtgttcaatcctaacatacattattattttaagcactataataatgatcatagaaatagtaggatctaccttaatgatatccatgaccataaacacggtaatgatctttatattctcggtgccgaggtatgttttagagtagagggttgataaacaaaatatgggcctaactgatttcagccagctagatatgcatgatcacgtggctaactgatttcagttacatgagtacaataactctgtgtccttttcagctctgaccaagagtcaactagatatatctagcttcgtgctagtcactaagtaactgcatgacatttctacagagtga

SEQ ID NO: 78694 - DNA, 321 bp, Oryza sativa
agcagatgacagaactgaggcttgaaacgcccccttagggcacaaccccatcaccgaggaaaacgggggaggcgtgggaaccgaccatacacatacgcagatgataattgtcaattgtaaccacacgtgtcaaccgccacaattgcaaccggggcggaggcgcccgcttctggcacttgatacctgaaagaaacccacaaatcgcggctcacaaattccacgccggtatatcccgctccgctgaatcataaacggcatgggaagcctcgcattcagacacgctagcacggtaggatccagaatcatctgacaactaacatg

SEQ ID NO: 78695 - DNA, 454 bp, Oryza sativa
  unsure (1)..(454): unsure at all n locations
tgtcaaagcacgatgggcaatattcaagcctagagcatttcttgagattcaaaaaccgaagagaggttaggcattcaaaggattccagcacgttaagatcagaacaatatgaaaggtttatgcttttcaaatatgcaagttggccaaatgattgtggtaatacctcaagtttcaaacattttgacagatttaaatactgaagtgaatatatgttgccaaaaaagtcgggcaacatttggaattcaaaaccacttaangtaagaactaccaaagaacagaggctagcatatgattccaaaaatctgatatgtaatgctgaaagcttanaacattcagaaagattcaagaaacggagtttggtcagatnttcaagagattcaagaaaactatttacttcacggcagcatgacaagtttatgtaatgtagatcatgcaacaaatgaaagctatcaat

SEQ ID NO: 78696 - DNA, 357 bp, Oryza sativa
  unsure (1)..(357): unsure at all n locations
ctcagcttcttgacggcagatccggcggcggagacaacttgtttttgttgttgtngnagctgctgagttgttgtgacgatgattatgatctatagctcattgtggattgatctaatggttcaaagcgtctgattttgggggccaagcacggtggatgtgctctgtgccctccctgtttttcatcccgagaaccttaaaggtgccggntcctaaactagcatcttcgatgtgactcaaaggtgccactgctatgtgttagttgggaaccgactataggtgccagatttcttaatcacaactaacacgctntgtgtggcactgaataatgatctcttactcttcctaattacgagtgtt

SEQ ID NO: 78697 - DNA, 406 bp, Oryza sativa
  unsure (1)..(406): unsure at all n locations
tgcgccggggcacgcnctccggcctgccccgaacggcatcattctgatctccgcgccaccgcaggagacggcgtccaccatggcgccctccccgccttccatgaaccgctccggcacgaactcgtgcgggtccgtccacgccgttgcgtcacggccgatctccgctaccgcgtaggtgacaatggctcccttggggatcacgtagccaccggcgccgagcgggacgtcgcggtccaccgtgtgcgccaacaagtagtgcgccggcgggtggaggcgaatggattcctgcaccaccgccttcaagtacggcgatggcgagacgcccacgccgccgctgttggtggtcttggcgatgtcgtggcggagctttcgctggatgtcgctgtggtgcaccaggcgcgccatg

SEQ ID NO: 78698 - DNA, 459 bp, Oryza sativa
ggctcacttaccgatcaaggtggttggagtgtgatctgggctctccttatattgcctatgtttatgagaggatttgatccttctatgtggcatgaggcaaccctgtgtcggctggggaaaggctttgtcgcgaacctctgacaccggccagtgtctagagtaagttcgtgtcttgtgggtgaagtgtacccctctgcagaggttaactaactgttcgaacagccgtgcccacggtcatgggcggatgtgatgtggctcccgttgcgtatatttgtttgcctgtgctttgtgaaaagttgttgtggtgtgggaatcgtaaccagaatcagcctatgtggcagatggacgacctgagtggtcagaaacgaatctgtgtgattcgggatgtctgcgggcatcatagactaagcttccagagtggaagcagattgttgtgctgctgggcaacttgactctggg

SEQ ID NO: 78699 - DNA, 345 bp, Oryza sativa
  unsure (1)..(345): unsure at all n locations
actaagctttggaagtgtcgctatggtaatgtagatacacatatgggttttacatttttcgcgcccaaatgaaccttaccataatttgaaaatgcctaaaatttacatatttgcaacattgccaaaagttgggaggattggcataataatattgccaaaactctatacacattaccaatatttggtactaccttcatacaagaataattgcaaccgtgggtatctgtgtccaatgtttgaccactcgtcttatttgaaaaattnatgaacaaacctttaataaaaagcatatataaagcactattcatgtcttatcatgtaataacaataaaaacacttatcctg

SEQ ID NO: 78700 - DNA, 413 bp, Oryza sativa
  unsure (1)..(413): unsure at all n locations
tcanagaatngaaggattgaanaaaagttggaatttccccactcaagttgtttcgggagagatcaatctcagaaatacctttcaaattgacgaaagagtcaagaattgtgccatcaagaaagttaccctcgaggtgaagggactctaagcggacacaagcacctagagtagttggaattttcccagaaatatggttgttggaaaaatttagtaggcctatattgatcaagctaccaacctcctgtggaatctgtgcagacagctggttgtgggacaaatccaaacctgttgttaaggaataaagcgagaaaagctcttttggtatgctcccattcaaagtgttacatgaaagggtgagattgactaattntttgcaatcacctaatgcactatgaatgggtccactgaaatta

SEQ ID NO: 78701 - DNA, 342 bp, Oryza sativa
ggggagctaaaaccatctgatgaacgagtacaacactctatagtattgacgcaaccctcgagtagtccccacacaatccttgggagcattcttctcatacataaaagtattgttggtcggtgacagagcattctctacaatgatatgtgtgcgacttaagtcatcatcatctaaccccaaagctgcagcaaactgtgccatatagacactatactgctgcccctgaatgggtcacttcacagaatcagccccttcttggtggagccaagaaagcagtggagtagaactgaccagtcacttcctcattccaggagtactgcaaagctaacaaatctgccacgt

SEQ ID NO: 78702 - DNA, 288 bp, Oryza sativa
tatgcccttatgcacggccatacataacatataaatcacacgtggaaggggtgggccattagctatagcagcaagtgctgtaaccaaactgattgcaaaagaaggtaaatctgccactttaagattaccatctggggaggtccgtttggtatcccaaaactgcttagcaacaatcggacaagtgggtaatggtggggtgaaccaaaaaaagttgggtagagccgggtctaagtgttggctatgtaaacgccccgtagtaagaggggtagttatgaaccctgtggacca

SEQ ID NO: 78703 - DNA, 460 bp, Oryza sativa
  unsure (1)..(460): unsure at all n locations
atacaagcgggtagcaaggtgagtggctctctgcatcagtataagggcaagaatgttcagcgttttaatcacacatttaacactgggtcactgaagaggttgaaaaatgctgtcaaggctttagctgatgttgcctctggtgttgagcgatttatccaagttctgaatcagtttggcaataaggttaactttaaacaagaggtggaattcaagaatttgcgtgagacaagctcattgcctcatagcctagtacttggaagagaagaggagagcaatattgtagttcagtggctgaccaagcgtgaaaacagtgcatctgaacagaattgtggcaacatccccatattttgtatagttggtttaaggggtattgggaagacaacactagctcaagttatatgcaacgataaccaggtaaaagaatattttgatnntgtcgtctggggttgtgttctcacat

SEQ ID NO: 78704 - DNA, 455 bp, Oryza sativa
  unsure (1)..(455): unsure at all n locations
tgtcaagaagaacttgtgtcaccactgagaaatccatgggattgattagcctaccaagaaagagtatttccaaagatgttgcaacatgcagtcttactttaagttctctgtcatatgcacaatccaagattgcaaaaaggatagtattcagaacggtagcaccctcatggacttcgtatgagatattgcgcttatccacatccctttccatgccaagaaccaggtttccaaacgtatctatccaagctagagcttctaatttcagtgtcatggatgatgatgcattaacgccccaaaccacangttttccatacttatgcataaatttgtttttgcagtcacaaaaggacttccttgatttaataaccagctgagtntgactacctgaattcccagaaccagttgctttatatagtgcgatagtactcgagaggtccatacttgctcatctgtgt

SEQ ID NO: 78705 - DNA, 423 bp, Oryza sativa
  unsure (1)..(423): unsure at all n locations
tgccgatgcccacagtccaatcatctncatcacaagcatgtcggcgtnctccctgctctctcttttatcttctgatctactgacatgtgagagtagtacaaagtgaaagcttttggtaaaagaaactagcccaaagtgaaaactttgtctttagaatggtccatgttaaaacttgggtaaaaataactagaccaacgtgcaatttacttaaaaaaaaaggaaagaaaatcagtccttggcgcgcgccactccgtcgacctcgtctccctcagaatcggcggtcggcggcgtctgctccactgtcaggcaatgcaagcatctaccgcatcttcctctcccggattcgctaatccggcgggtgccccgcaacttctcttctaccggnctctcctctcactgcagcgagctattcgtttgcacagt

SEQ ID NO: 78706 - DNA, 328 bp, Oryza sativa
  unsure (1)..(328): unsure at all n locations
tgccagcagcaaacggtggctcgtttgaagttgatgtattaatatgaaatgaagagcacgctctcgcgattccatttctctacttttctcggattgcggacatcggagtaacgccggcggcgagtccgaacggcggctgtgcacaggctgctactgcatgtgcgcctataaccatgtagtgatcaaatggatgcatgcatgtgtttatttcatgtactacgacgctcaccgaagcttgatcgcggcttggagtggctgaacagcggtgacagtggagaagacagcccngcggcggcggaaatcggcatggcaacggtgacgatcacca

SEQ ID NO: 78707 - DNA, 474 bp, Oryza sativa
  unsure (1)..(474): unsure at all n locations
actcagctntcccagccccttttcatcaatggactcctgacgtctacgaatgagtgtggttcgttcgacaaattcctacctctatatctatctctgaggagtttgggttttgcaaaactccatagatatgcagaagagaaatgctatccccactccgaccaagacagaacttttaccaaaagtttattgtgatctttttgttcaaataacaattaaggtgaagcagggtcaggaacaacgaatctctttatgataaacagatccattttgcaagctcgttattacgggtagttcctacaaagaatcggactaatgacgtatacaatgcttgaattatcgacgtagatgctacatagtgngttctcatccttcagagactacgagtgtaatatgagcatccgttgacaaaaggatcaccctaagatgatcatctcatggctattgggaacgaatcanatcagatggttctatgtc

SEQ ID NO: 78708 - DNA, 401 bp, Oryza sativa
gacctatgaaactcagcttagcgtaaaacgacaagatgtcgatgtccagagttgttacgagtgtaccgtcttcgcgcctgagtcgatatgaacctggccgggtgactgcagagatgataaatggcccttcccgtagaggagataacttgtgccgatctcgcgtagtttgaattttcctctaaacgaggtcgccgactataaaggcacgggatcgaacattgcgattataattacgtcgcaacccttgtgagtatcgagccgactgaatcaaagctgcttcgcggatttctttcagtcagagcaagtcatccactcgtgcctcctcgtagcgttcttcgcggaaattactaaagcgcagagacttcgaatcaacttcactcggcaacattgcttctgcccca

SEQ ID NO: 78709 - DNA, 427 bp, Oryza sativa
  unsure (1)..(427): unsure at all n locations
tatcaaccacgatgcttcagattggaaatcttgagacagctgccatagttcatccaggatgctgtctcccaacgagcaaccgtgcaagtgccacagcgatctgcttacttgcttgtgtttgcaccatcgtgtcctcaagcaaagcaaggagctatcagctatatacgcctgtacgtgtatacgccaagatgctcagtctcgtatatcccatacaggagtccaaaaagtatacgtcaggagtaatatattggctgagatcatcagaggaaatcgtttctgattcaatcaagcatgccatactccgctgctgacatatatggcttggatcacaaaccangtttatcgtttaaattttcatacattaaatagaattaattcacagatcactanattattttntggtctatttattttatgcatgtaccac

SEQ ID NO: 78710 - DNA, 469 bp, Oryza sativa
  unsure (1)..(469): unsure at all n locations
tactaagctttagatcgaaccttatgtgatttgctntctgaacagacaccttctatcagtatatttccattcgggggcaaaggtattattgctggatgtgattttcgacagatattaccagttataagaaaaggttcgcgtgccttcatagttgatgcatccattacgaattctcctctttggcgacatgttactcttcttagactgacaatcaatatgagacttcttcactgtgaccttggtgagcaaggttgcagagatcttaaggactttagtgnatgagttctagtgcttggtgatggtaggttgactgcgacaaaaaaaatggtgaatcagaccaacatgggtggatttcctgatgtcttttgatcaaaacatccgtgacaaataacgccatatagataggtattccgccttcatgataacatacaaacatgctccttgctgtcgagctatgttgccaaatact

SEQ ID NO: 78711 - DNA, 420 bp, Oryza sativa
  unsure (1)..(420): unsure at all n locations
aagcttataattctccaacgatcatncctccagcaaaacacactgtcttatntctgctgcttggncaaagggaaataagatattagattggcgcatgggctgatgggcacatgatataacataaacttgaaagaccacaagtcttcaagtcttatatacgctgtgaaacataatctttttaagttcttaatttagatgcacgcatgatcactaaccaggtacagaaactagcatgttgttgtcgactgtcagcactatcaatntcttcaaatcaccaacttcacgtggcaaaactgacaatttcgtgttgcaagattgagcttctcaagaagtgcaaggcgagttaattaacacgaagcatctgccnagttctgcatagcatttcatgggcagatcattatagcatatacatgtccatcc

SEQ ID NO: 78712 - DNA, 354 bp, Oryza sativa
  unsure (1)..(354): unsure at all n locations
ntgtacntttattagaatactattctttatacatttatggtattgaatatacttccgagtatatgaatgcttactttatactaaatatacggctagcttatctaagagatgctcggagcgggtataatgttagcatatgccattactctatgtcatgacgatgatatttgagtagtatatgctagtttacgcgtgtgtctaaattacgggatatcattatctaaggctatatattgcggatgagatgtgggccgctgatggtgacaacttagtacaggtattcctttcgcgccggatataatcctaagttaatttcctgacgagagtatttcttcatatttaaccccggctgta

SEQ ID NO: 78713 - DNA, 459 bp, Oryza sativa
  unsure (1)..(459): unsure at all n locations
ctaagctttcttttttctgatatacgtactggatttttttgttcttcgacggtacgtattctcacttctatacagggaaggtattatatacacacacctaatgattattctaaagtaatgggcccaccaatttaaatggaaatcaacgatacatatagatctaatctaatggtataaaatagcgggtccaccaattaaatgaaaatcgacagtgagattagatagtaccacgtggcggcatatgagcgtttatatgagtcccacgtggctacttgagagcgtttgtaggaagtttaatgagagtttagtatataatagatagattctatgcaaacggctagaaaattcatgaatttaactaatttagtgttaatttcaatgtgacactcataggagttaaaaaactatacttctanaatagcaacagccaataaacatattattattatatcatttttg

SEQ ID NO: 78714 - DNA, 417 bp, Oryza sativa
  unsure (1)..(417): unsure at all n locations
tctgaatacaactataatgaactggtattacgagtgttaactatcaactgcgtacacacatggcagtggtgccttgaaaaattcgatactgtaaaggtatcctggtgtgtattatgataaatcaagcaataataacacgaaaggttntatccaaccaagtccatgtcgagcagagcctttgttgtgcaatgtgagcctgctttaccagagtggtttcccctatccttctctgaatggttttgctgttgtcatatcatttgatatatcatgcccgttccttccgcctcanatatccaggactccacaccagatcaatctgctcgcctactgcaattcagccactgtccacctatcaactcattcacacctgccaattgccattcagtcccatcccactatgctaccatttatcttcta

SEQ ID NO: 78715 - DNA, 364 bp, Oryza sativa
gaactatgtacgtcacagcggttgggttgtgcgggataacgtgcctgtcagtgcggtgtactggcgaagaacaaaggcacgcggagatcatgagagctttgtcccacattcggagaaagagatgctgtggaccacaatgctcgagacattcacccttcctgcgggtacagaggacaaagtgaaaaggtggactctgaagaaaatggcagaacagtttcagagcttcaagggagatctgtaccagaagtatatactgaaggggcagacaccgaacttcgacacattcccaaagctaatggatcactgagacgagttcgttgcatataagacacgtgaacaagggcaggcgatgatggaaagaaac

SEQ ID NO: 78716 - DNA, 335 bp, Oryza sativa
  unsure (1)..(335): unsure at all n locations
aactcaagcctttaactgcatcaaaccaacggcattcgatttactcaccgcgtttntttatcacccgattcgatagccataatcgccgtgaacaaatgtggatcgacgccccaggctgcaccggctttctggcttatcggcagccactgcatcacacgttgtcacggaactttcgcgttccacagcgggatccgattaacatgctttgatgaacaacccgctaataacacaatcaaaaaggaaaccatctaaattcacttcntctatcttatagcctggaatcgccgttgagggacaacggcacacctaagcggcatgaaatacatttcggttct

SEQ ID NO: 78717 - DNA, 360 bp, Oryza sativa
ctcagctgattgcttattagcatcaccgtgcatctttgagaatgttttttctttgtctgttcgtgccttggttagaacttataatacatggaagagtatttgtcttcgattcggagtaagtttcgtgtcgtgtgaaagatggagaactgcacgtggagaagctagcttcatggggcgtagacgaccgtcagatcgtgcattcgatggtctagattgagagtccaacgtactacaatgaagcgcatatgttggcattattggtctaccattcggttgatctggatcatcctctttttctatcattgaatagtagattataaatacaacttgttgtttgccagttattcaacgcccacatgt

SEQ ID NO: 78718 - DNA, 445 bp, Oryza sativa
  unsure (1)..(445): unsure at all n locations
tatcctataananatagacagcatctatcaaatatagatattttaatatatgcataccttcatcatctccacgttctcaatgtaaattaactaaataagagataagacttcaacaaaacattatactcacatgcatatgtcaatcacatggaatattctatataactatatcaatatgtgcatggagaaaaagaatgatacatatagcttgatctccatgcaatccttgttatttaaattcaccatcaatgaacgtttctatctcaactcatatgaagtctaagaatcacctctcacaaattccactttcatattcacacgaggcaaggcatataaatgctcatataacaatagtttcataattggatttatcattaatcaccaacacccaaataatggcacttgtaacttcatcgggccgtagctgtggcgaagtgttgcactg

SEQ ID NO: 78719 - DNA, 371 bp, Oryza sativa
  unsure (1)..(371): unsure at all n locations
ctcgagcctgtaccattctctatcttatgtagataagctcgctcgagctcggctcgttgacagccctatcccaagtactgcctcccgctatggccatacaatgttgatggcacaacaacgcaatcaatagacaataaactacgagggcccaactgtatacgtctatccatatctgctaccgttgcacatgtacatattgtaaaatcaaaggtgtttttgattattattctgtgatgaacaattgggcattggagattattggctttgttatttggaatttaatcacgacagtggtttggagatgattggattctacaggtgaatctgcaggaattatcattntgtgtggaccggtcagaccgggctctggt

SEQ ID NO: 78720 - DNA, 307 bp, Oryza sativa
  unsure (1)..(307): unsure at all n locations
ttcttaacactctcgagcgcatctatgatagcctcgcacattaccagaatgcgaagcacagnatcaagatgtgaaccccatctaggatctccatgcctagctaggcgactaccacggttcaggcctcgtccagtggcaatcacaccatcccccagcttttctaacaatacatcatgaagcttcgcaagcaggcgttctttccatacaagatgcacacacagtgctgactattacaggcacatagctcataaaatctgcaatggctggagaagaagttgatacatcatcgactaccagtttggagctg

SEQ ID NO: 78721 - DNA, 447 bp, Oryza sativa
  unsure (1)..(447): unsure at all n locations
tcaatcatggcaagagaaaaatgggtatatatgtgagaatactttagattaaactgaactgtagctgctgggtaaaaatactgccaataatcgaacgatgaaatggctatgaaataaattgggttaaaaataactcgaaacacgctaaggtaaaagatgatattaccaacgcttaatactaaactgctcaatggaatttgcaacatgaagcaacactcagtgatttcattattcaagaactatgagaanaatgattaagtattgaatcgcagagaaacaagaattggcaggttgcattctcatactggtcttgtcttaaaaaaaaaaatctttgtaaaagatttacatctccaaagctaccatatccattgttcttggttcaagaatggtttgtatgcctttcagtccatgctcttgccaggatgctagcacacttacaaaaaaagt

SEQ ID NO: 78722 - DNA, 402 bp, Oryza sativa
  unsure (1)..(402): unsure at all n locations
taatgttctcgcaatatcttctcattgtaagtgatatttcgattcctgttagaaacttccgtttgaaagaacatgttattgaccctaaagaaagaatgtggtattgaagcattccaatcaacacaataagttattaaacagttgctatgatcacaaaaatgttcgttcttttagaaatcaaggtacaaaggaaaatatctggtttcatgttggagacatggcagcatctgattcatatacatgcggataaatcagctatcacatcttctgattatgtagagcttgtttttatacactcaacaagctgcaaccaaatgtcagttcgaccaaagtgttctgctcacatttnctaattaaggtatgtcctggntcagctaatatataaaagagcactctataaac

SEQ ID NO: 78723 - DNA, 401 bp, Oryza sativa
  unsure (1)..(401): unsure at all n locations
atagtctttttttgtgccaaaaatacaatttagcagtttgggaaacatatgcgtgtgaaacaaggagtgaagttggaatataaagaaaccaactcagcctaagagtacatgtgtacaaaaaagtaggaggaataaaaagaaccatgaacgaagcaacttacaggagctgataagattgtattgagtaaggtcttatccgtgtgaacaagaatacatatataacagaataataacctttgacgttatctcgtgcccgcatcgctgctgaattagtacctcactctgataagctaccaggtnngtgtataatattttctttcccaagctgatgttgtaagtctaaataatgctaagtatattcatcttgacaggtggttgtatgatgcccctttcatgctgac

SEQ ID NO: 78724 - DNA, 473 bp, Oryza sativa
  unsure (1)..(473): unsure at all n locations
actcagcttgtggaacccgggagatacctatagtatgttccattcaagcttatcacacatactgttttacctttaatttgacctgaaactganaacattgctggataatgcgtaatggtcacgaaaatgatggccttcactgtgaagtattctcttaagtactcgtcccacactttcaatctctctttccataaatcagccatatcttccaacaatggttcaagaaatacgtcaatatcaataccaggctgacggngtccctgtatgaggatacatagtagtacgtatttntgcttntgacaaagccaggtagaaagattatacatggcgagaagcactggccaagtactatgtgagctgctcatgtctccaaaaggattaactncatcagtactcanggcaaatctaatgttccatgggtctttagcanactctctatactgagcatcanagtttatccactgatgagcatc

SEQ ID NO: 78725 - DNA, 162 bp, Oryza sativa
  unsure (1)..(162): unsure at all n locations
tgttcctgaggtgtactggatttccctatctgtatatcaagggtgtccattctcctaatgaattcactcaagtcccaacgggaagaactcgagcgccattcactttggagatggaggcacaccacttgacctgngaagttaaatgtcccccattggatgtca

SEQ ID NO: 78726 - DNA, 241 bp, Oryza sativa
ctattggcatgcgaggtgttcctgaaccgactatctacttatccaaggtgtcccattccaccatgtggatgcactttgattatgatcgatgagtttcccacaggaatcgcgccttatatgcgaatacgggacagtgccacatatgcacaacacccgcatcgagagatttcacaattcatttggttgtcaaacacaccgacaccacatgtccggttttgaaggcttcacaaacccatttccc

SEQ ID NO: 78727 - DNA, 282 bp, Oryza sativa
gaccatatttaaccagagcgaaccataagagcctttgagcaaggttaattgcatagcccactactaaatgcacatcatcttaaccaatctaatagctcattcatacaatagctatccataaaccattaatacatggtcccacctctcatacacacataacgtattggagtttgcgctacagctggctacgaatctgtagcgcgctttccttctatctcttcatgcctccaccaatgcttaccattgacctcgagcctgctattgaactcactcttatagaat

SEQ ID NO: 78728 - DNA, 454 bp, Oryza sativa
tgtgcgctggcatgccgaagaacggatagtcgatactatgctgatgtattcagcagattcagtacagtggaggacaatcgataggatttaccaggaattctcaaatgacccaagaaacatgcgtttcgcaatgtgtacggacggcattaatccttttggtgatttgagcagtcgtcacagtacatggccagttctgcttgttaactataaccttcctccctggttgtgtttcaaaagaaagtacattatgcttgccatgctcattcaaggaccgagacaacctggcaacgatatcgatgtgttccttgaaccgataatcgatgacttcgaaaggctatggaatgatggcacacgaacatgggacgcatatgcacaagagtatttcaacctccatgcgatgctgtttgtaccatcaacgattatccggcccttgcaaccattctgccaaactgtg

SEQ ID NO: 78729 - DNA, 374 bp, Oryza sativa
  unsure (1)..(374): unsure at all n locations
taatactgtagtaacaaagttgatggaagagtgctgttttttcttttctcggcggctcgncaccaaactagctatagctatagcagtagcttggcttaaatgcaactggagaatgttggaagctttgcaagatatgaaaaaatggagtagctcaacgtatgcatgtgtactactgtagtgtatacgtatagcaccatctaagagtacacactgtaactagtagcagcatcattagatcgtcagcagctgagtgttcttttctttgttttntttaagaatggccgacttgtcacctttgaaggcctcctagctatagttccaactttccaagtcaatagtactctttgtcattacatacggtgtagtctaaagac

SEQ ID NO: 78730 - DNA, 459 bp, Oryza sativa
  unsure (1)..(459): unsure at all n locations
tatattgcacctgctggagactatacatctcttctacgtcatcttgccataaagaatatgcttgcttgactatcattgttcaaagtacatattcatgatagaacattaaattacagcattataaatctagctagtaatggtcgatactaattactccctctatataactatcaaaagtagatcgagggactactagttngacttattttctggttaaagttctaaaattttgactgccgcatattttaacggagccatcattttgcttattctccgaataagcgaaacggcatatttgaaaataaaacggaatttggtcataaaatgtttatatacgtggtcttaacgatatgaaaacaaaggctgatgaatatcttcgatgaacaacctcangagcagctccaaattagagctaaaatcccagtttgctgataacgtgagctagcgaaatccctacac

SEQ ID NO: 78731 - DNA, 476 bp, Oryza sativa
  unsure (1)..(476): unsure at all n locations
cttagactggaggaataatccattacgtttacctatatggtcatagtcgtcaaagtgtgggtgtacagatcactgccaggtggatacctagnttgcagaacaaacaattggtaggagatactttgtctgccccaatgtagacgacgatttcgctgtacgtataacaaattccaaatttaactagcatctgcttattattactatcatatctgactaactatgtttgtttcttatggcaatccatgaaggtgcgcattcactttatggatcgacaatgtcaatcccacatatgatggccaacagataactgagtctgaaacactggttgagtaccagcgagagaaggagcattaacatgcaatacatgttgaacatcgcggaaagggctgcagatacgctcacgctcgatttgcacgacttgacaaattgtatcttttatccatgccatcntgacattataatgcttcattattatg

SEQ ID NO: 78732 - DNA, 466 bp, Oryza sativa
  unsure (1)..(466): unsure at all n locations
ctggcagatttggtagccgagtggaccaagtgccaagatgtctcacctgtggagaatntagagtactggactatgcantttgacgggtcaaaaagaatctcgggcactagatcaggggttgttctgatttccccgactggagagaggctcacctatgtgttgtagcacagtacgaagcattgctccatggactaaggatcgctgtgtctctatggatatggcgcctggtggtccgtggtgattcccagttggttgtaatcaagtcatgaaagattggtcctgtctcgatgataatatgtctgcctaccgacnagaagtccacaaactagaagacaaatttgatggcctggaattaacccatgtgcttangcacaacaatgaagcggccgacatgttagccaacttcggatcaaacgagatgcatacctttcgatgtttttgtctacatctctatgaccgcagtaca

SEQ ID NO: 78733 - DNA, 360 bp, Oryza sativa
tcatccgcttagagtcagtatcggcttcagagatgtggaatccgccgatgggaatcgtcaagtcgtcagcaattgtgtgtctaatggagtcagatcaattaaaggaaatttatctataagagtcccgagtcaacgaggatgtggcctggccaggtatctattaattaagaatagcttgctagtttccttttatctttaagaaaatgcgtttagtgtccgataaggactttatgttctcctcttatctttacgaaagattctttcttgtccgacaaggactagtatctcctcatgggtataaatatgtacaccccgtgtcattgtcaatcatcacacagatcattacaactattctcggcg

SEQ ID NO: 78734 - DNA, 410 bp, Oryza sativa
  unsure (1)..(410): unsure at all n locations
tctgtctcttctcatgaggcatactgaccactgcaactttatatatcaagggtgaagtgcaatggttaaaataaaaattggaggaatcaanggttgctggctggctggatagagaccggaagttccggaccaagaacactggaacttccggcctgcaaaactaaagcacagaggattcaaacaggccagtgcatgtgacaaaatcctatagatcggcaatctacaaggtagcaggaacaattctatccaaaaggttttctccctaggttcacatatttagagatcggggcaaaaacatgatgaaccaaaagtgaggatcataagtgctaccttgggagaggaaattgcaaaacgatcgcgggatgaaccttctatccaccaatgtggntgattccacggagaggaatcaa

SEQ ID NO: 78735 - DNA, 80 bp, Oryza sativa
gtatccgtttctgagtatgggtatcggccgctggcaggctggatagagaccggaagttcctgaccaataacactggaact

SEQ ID NO: 78736 - DNA, 453 bp, Oryza sativa
  unsure (1)..(453): unsure at all n locations
aactcagcttgttacttattactaccttttacttgattttttctttattcaataatccaaaactnggctattaatgggataaatgtcttaactccctcctttcacttgtctttagatgccggctacagcctgagactagttggcggtgaggggttgtcaagagttgcgtacaatgtcctctgcataaggatttgggactgcccctttttatgcccagattcctcatgattcgcaccgagaaaaagtgccgagtcaaagtcaccctaaacagtaatagtgaagatatcccctcagtgatgttcgaagctggaggaagaaactacattcatgcatgttaggaggtggcatcgatcgccataagagagctccgtgatcgctacagtgatcagttggccgacactgagtatcgctaccatccttgccaaccccacggaagtgaccgtggagttacct

SEQ ID NO: 78737 - DNA, 407 bp, Oryza sativa
  unsure (1)..(407): unsure at all n locations
aagtcttaggtggagtcttggcttataccccattttatcgcctgtgaagatggagccgtangccctctattccgctgctggttatttntgattgtcaggccttaagtgccttttgaataatgtaaatattatcgatataataaagatgtgtcttttatatcatgattgtatggtgtaccccggcttttcctgggacggggattaatacactagcgttcgggaaaatgcaattttctcggtcgcgaccgtttctagagtgaaagctctctggttcttcagctctgtgtagcttcttcatacacagatccaccagaacacaggagtagggtattacgcttctcagcggcccgaacctgtatacatcgcccgtgtcttgttgctttttccactctcgcgaactttcacag

SEQ ID NO: 78738 - DNA, 396 bp, Oryza sativa
  unsure (1)..(396): unsure at all n locations
ngactntgtgctggtgccgctgggcctggccgtgctggccgtctaccacctgtggctcctctacgccgtacttcgncaccccacccgcaccgtcgtcggtctcaacgccatctgccgcaagcgctgggtcaccgtcatgatggccgtcggtaccaattgattctcttcttcttgacatctctctctagagattctagaattgtcagcctgtctgtcgtacgttcttgtgggcgcagaacacggagaagaacggcgtgctggccgtgcagacgctgcggaacaacatcatggcgtcgacggtgcttgccacgacgggcatcacgctcgtctccgtcatcagcgtcttcctcggcgccacngcngggaggtccccggctgtcccctcgtcgtcgtcgt

SEQ ID NO: 78739 - DNA, 478 bp, Oryza sativa
  unsure (1)..(478): unsure at all n locations
tcgatggtgaacttttcttacactatttcgttagtccacatattcatagcactntcaaacacaaatccaacagcatcaattngtttatgataaaacctanatattatatcgaattaatcgttagtctgaactcaacattggatcgataaccaaaccgcgtcttctatatatttctggatggagggtagtatatgcaatctaattgcagatatatatgtacgtgtgcatttgtatattagaatatcgccttcaaaaagggattcctactagatttatttgttagattgcatggacccagcgccacccagttgcactcgttggaatatntcaatcgggtcgagttttcacctctcgcctagcgggntgtggntatgtatatatgctttaatttgaatagcanattatatatatgtatcacatatatatattgccagataaattctcaattccatgtatgatgcacacatatatatatgta

SEQ ID NO: 78740 - DNA, 397 bp, Oryza sativa
  unsure (1)..(397): unsure at all n locations
acccacaactgagtagaactagccactcacccgcgtattataagttttcaaatgttctatggtagcaagtctgtcatacaacttataagaaattattatctgctgtcaatgtcaatcctctggagatagtcataacttaagccaaccctacccaaatctcggggacgaagatttattttaagggggatagactgtaacatacccgaaattttatgacttaaaatttcttgtcaaaatagttagaggttaacttctccaaatntcgagagccaaaaatttccgtctaatttaggtgatgatcaacttaaaccattgcatgattaaaatttgagaacaaaataaaatcttttcattctcaacattagactagaaatgtcatttagcatacatgtacata

SEQ ID NO: 78741 - DNA, 438 bp, Oryza sativa
  unsure (1)..(438): unsure at all n locations
accttaaaactcagcttgcttcaaactggataatactatntatgtttgtcccttcttgatcttattacacacaagaaatgcagagtatggtatgcctttttattctttgcatgagttgcacaggctgatgctagacaagcgacttctcatcttgatcctgtggtctcttactactactgttttgaacatgggcagactatgctacagatatatcactttgtcataataaactgctaagcgctttccttcttttattagatgtatagcatgcaattataattagtcaagcaccaatttgttacctcttaggatgcttctaatgccctttatttttaacatgaggtgcgctgtctattttatatcactggatgctcttaaatctattactggttgtaaacaagctcttctatcggaatgcattcttttatgccacatatg

SEQ ID NO: 78742 - DNA, 434 bp, Oryza sativa
atgcggatattgtctctattttttcgcaactgatcggagtaaatattcccttgcaagtactgacgtgctagcattttcatatgcccatcgcactcctcaatctgatgatgacttaattcacgcatgccaataacgagagtttttaaaccgaacgatgaatatttgtggatgtgtgcctctgtatcacgaacaatgtccagatctaatgacattttggtaattacaaacattgaactgtccgcacctttcacatatagctcaacagtcttatccgggcagccaactatgacagacatcctcttacgatcactatcagactcatgaagtcctaatatttcaaatcttcacatccgataccacaagattatatggaactatagccatccttgtgaacagatatggaaataaattacacactaagacaacgaactgaa

SEQ ID NO: 78743 - DNA, 439 bp, Oryza sativa
  unsure (1)..(439): unsure at all n locations
tgacagccaccgacttcgacgcctcttctccgagcatcttcttctgtgtggtctccatgcactgccggaattctgtgtaatgttcatatagaccgccatcgagggcgatgagcgactgtcgcttgtcacctgggacgcctctgccgatacttctgatgatccctacaataccagcagcagccagacgggctgatcttccggtgacgatgtcacagatttcgacaccatcttccttgttctaaggatgtgctcggatcagtggaaaagtggacaatgccgcgaatgggtcactgtgcataacatggatgagagaatcaagncaatgctggattatgataagatacctcctgtatctgcaattttcacccatattgaataagtgtcctatgagcatacggaaatcagagtccgatttatgaaaaagaaaccacactttttt

SEQ ID NO: 78744 - DNA, 356 bp, Oryza sativa
  unsure (1)..(356): unsure at all n locations
ctcatcaagcacatgttcaggacgggctcctttcgcctggcgacactggaaggtgaagagttcgaccattcctggaacactgcctctctcaagcgtttctatgtgtaaaatgggtggcacccaaatcgccaacttgtaaaaatgtacatattgttatgtaagcctttcngcactatgtaagcccttcggcacaaaaattgcaaaaaaacatgaaaatgaatcaagacaaataaaaactggatgtgggctattatccatcccggaggcccgaaccagtataaaatctttgtgtctcttgccttcttatctgtatgattgataatttgtggaaaaaccctaaggcaaacgcctgatca

SEQ ID NO: 78745 - DNA, 403 bp, Oryza sativa
  unsure (1)..(403): unsure at all n locations
tgtntaanagtgtagtgcattgtagcataacctacaataatatgacaaatgaaagntgtctatacctccataccccaatgtgtgccactctcatatttgcaggaagaaacttcttttgcaacctcaatgtgacttgatatatctactattggctcaccggacatatccncagaaatgatgtaccgagctgattccttcaactcctctgaactttcaaacttgaactgaagctccttgtaagatggcgaacctacagaagcaacatgaaaagtctcgcgatttatttctactagaatgataagactaatgttctcctgataagtgattaccatcacatcactgtgtatgctccaacttcacctgcggcgcgctctctttctaccacaatggagtctggttcgat

SEQ ID NO: 78746 - DNA, 460 bp, Oryza sativa
  unsure (1)..(460): unsure at all n locations
ttattacttacctttctactctgaatntctaaactttattccaatatgatccacaaacttgtgctattaattggataaatgtcttaactccctcctttcacttgggggagatgccgcgcttcaagcctgagtacttggttggtgttgagggatttgtccaggagttgcgtacgatgttctttgcataagatttgggactgccccttattatgcccagattcctcatgatcgtcatgaagagaagtgccgagtctaagtcaccttgaacagtaatagtgaaggtatatcctcagtgatgntcgaagctggaggaagaaactacatncatgcatgtcaggaagtggcaagatcgccatangagaactccgcgatcgctacagtgatcaagtggccgacacttgatatcgctaccatcctctgcaaccacagggaagtgatcgtggcagctaccttgagactg

SEQ ID NO: 78747 - DNA, 274 bp, Oryza sativa
gccttaacgaaaatttgaattcagaacctaattataggttgacttattaattggtatccatcataatgtgtttctggcatgtgcacgcccacgcctaccatctttcattggcagtttacaccgacaaatgaagaaccatataacatcattgcttataataaagacagatgatgactcaaagatcaccacagttgacatgagttctgtggagcatcgattacctttcatcatctgcgatgtccatctatgtaagcaagtttagatgacagcatct

SEQ ID NO: 78748 - DNA, 442 bp, Oryza sativa
tcagatatcacactaaagcacttagtcattagtgtgatttatactggcaccaatgtcttcttcagaaaaatagagtattacatattcgatccaaattactatcaatttatgtttggctaccggcaatagcaatcatgagttgactagcggtggtgtgatagcatgcactgaattgatggaggggatgaccaccaacaaaaaccaagatcagaacacgaatgatggaggattattctcaagatcagaacacgaacgatagataagcagaacagagaatgcttgtggcggcggagagaaatcacaatataatattgagttgctatggcttcaaaagctttgcaaatcaatccatatgtcatactcaaacaatcacttcacccgtatagatacattatacaagcaatatggctaccacaacgttcttgatcgttgatttcagtct

SEQ ID NO: 78749 - DNA, 276 bp, Oryza sativa
  unsure (1)..(276): unsure at all n locations
acaccggntgaccatcatcatggcacaagagttagccttctgatacctgcaccacacacttaatatcaagaggcgcaggggatgttatgggcctatctaaacctgcgagcgacggatcacacttcacgagtccagggccctattttatatgagccgacaatccgtgcctaactcaaaagatgccgagccacctccgaccgacatggcttgagtcaggaatgagcatatgacggccatgaagaagccgtcatgtgtaatggcgctgcacagtgacat

SEQ ID NO: 78750 - DNA, 339 bp, Oryza sativa
  unsure (1)..(339): unsure at all n locations
ggccgaggtgctgcgcattcgctcgcctaccttctctatccttataatccccatgatgctttggactggttgcatgccagggggaaanagttggacaccgtacactgcaatgattatgagaaagtcatcgtcgccgctcaccaactgcaagggcccgcatctctatggtgggaccactttcaggctacgcagccagagggacagcctatcacctgagcccgattcactgccgccttccggatgacccatgtgcccgccggagtcatggcccttaagaagagggaacttcgggagttgaaacaaggcaaccgctccgtgatggagtatttgcaccgagtc

SEQ ID NO: 78751 - DNA, 452 bp, Oryza sativa
  unsure (1)..(452): unsure at all n locations
ggacgacatagtagtagaaccttgagtaccacaagcttctactctggcgtgccactgtcgacggtggatacccatagaccggatatcgatggtattggggtacactggtacgacgatctacgtagtacgacatcaagcaaacaggataccaagattatactggtccangccccttgataggtaatagccctaatctagttgatatgggattatatagtggaaaccacagattacaaagggaatagcagaactcgatgataccgatgagaccgtagtcaagttggctcgactagatcaccccggcgacttagctcctgaaggctccacttcgtaggctgtggtggttgtgttggcggtaagattcgatcccttaggttctcccagggtcccttttataccgcaggttagttggtcttcaagatgactcaggacattgaccctaacaatataat

SEQ ID NO: 78752 - DNA, 299 bp, Oryza sativa
  unsure (1)..(299): unsure at all n locations
ctgaatccggagaagttgcgtttcggtgtccgcgcatgcaaggttggtggggttctcttggtttccgaagaggcatcgaagcgaatcttgagaaaatcgatgccatccagcacatgaagacttcgttaagcgtacatgaagtacaaaatgcttgtacgcccgaattgcggcactcagtcgattcctctcataggcagccgaaagaggtctgcccttcttcaagacactnccgggcgcggggaaagttaattggaccccagagtgtcaggcagcattcgacgagctatagctatacttgc

SEQ ID NO: 78753 - DNA, 366 bp, Oryza sativa
  unsure (1)..(366): unsure at all n locations
tctaattaatgattntactaactggacattatctcctacgatttttcatttacatgggggtttgctctaaaataccaattcaattataggtgtattatgaagttgcacattttttttaaactctaccttatatccagctatgctatgtcaaacatcaaaagaaggataactccaatattcttacaagaacaacatttttgtgccacaaccttcttcagatgtacacatgagtcattattctgatttcctgaacccacacacttgcaaaaataaataaataaagtattgctgactagatattctccacataaaatgccagtgcgaggttgaggaatcatccctgagcagttattacaccttaatact

SEQ ID NO: 78754 - DNA, 469 bp, Oryza sativa
tgttgaggcctaatcttgacacataggcaccttttctccttgggtgtgcatttactctcttatatggggtcgtcggatgaacaggaccaggatggggacagaagccacatacaaaagcatgcaatgaagccgaggaatcagtgatatgatgactactggcacccagttctgcattgatgattacatgcaaaccatggcaattgatatgagaataaaggaggagggccttagatggcagagggatgctgctgctgctgctgctgcatatggtggtgctgctgcttccaaccttcaaaccgtgggatgttcggtgcaagaatctgacccctttaagtacatcagctgaaaagataagttaaagaaacatgggaaaactaatcaaaaatatcacattctcttgaatattaactgcttcacaccctgacttactcattctattcaaccattaatagaggatctactgcattta

SEQ ID NO: 78755 - DNA, 475 bp, Oryza sativa
  unsure (1)..(475): unsure at all n locations
ggatgggtaacattggtcagactacgggcacattagtggatgatcagcctgttgaggttccccacacagtggagggccaaatacaaactaaccaaggccataacctagctgagcaatccaaaagcattgcatgggctaaccactgtatatcacagaccaacccacctacaggggtnttgcataaacacaacactattgtttgctctatagacaactatttagtcctccaactactgtatcagagaccttggccattntgatggatctatgactccaatagttgtcaatgacatggttgccatgcaatcatggcacatggggggcaccaggacgccacgatgtctaggctggtccctaagtgtcctcaaggtgagatatgtcgagctaaangggttgactaccgctcattgaatacatggacagcaaactgaacacatgatcatagatgagaagacgtacatgctaaaaggacatc

SEQ ID NO: 78756 - DNA, 382 bp, Oryza sativa
  unsure (1)..(382): unsure at all n locations
agcttggtgggccggtctcaagcgcagtggatgttctcatcgtctttatgttaactagcatggtggcccgcgcagattgcgcggctagcatcattatantttctctcatataatagtatatatgttttctcattatattattcaaatatattgaaatgacaacataattttaaattttgcaataactttacaaaaactactaatgtgtaatattcatattatattttatatatgtgttaagtattaattaattttaatatcaacatttagttagttgtaaattatatatattcctatatagactctagactcggctttaatatatctttttttttaattccgaattntctgtaaattgtatttctatataaactctatactc

SEQ ID NO: 78757 - DNA, 442 bp, Oryza sativa
  unsure (1)..(442): unsure at all n locations
tctacaaccctttatataatctgaaatatcctgaatagcatatgaagggtatgcaaacttcagttgatcgaaacattaacataaatacacatcaaattctatttccagtaattatcatgccttgaagaaagatcggtggtttcatcattttactaacttataatttttttctgatagtttgtaactacaaggcaataattgaaaaatcaaattaaaaattcaaccaagcaacataaaaagcattatgtcttcagggtgatgacnnaaaagaaattaagtcataagaaactcacagttgggattttcatgtaaccactaggtgcangatgtgcctgcaattcaccattcaataaattattccacgaaaaatccacctaagtattttcaagtgcaaatgactacacgaacctggacatagtctgagtagatctccattttaatc

SEQ ID NO: 78758 - DNA, 335 bp, Oryza sativa
agcgaggaatattttgcttacctgggtcctgcactcacttggtgacctttcattgttttctatgtgtgcatatggaacatcgtcttctctgggctaacacccgctaaaaatgcaaagcgaattatgtgtagaaaccctcgtcgagactattgttgcatactcccgtggtacaacccgactgattgactcattccctgtactatatgtagtggccagaactgacgcgtacgtacggcttaattcactcatacggttgttcacgatgggctctatcatatgcgctatgattttccaggcgccgtatgaattggctagaggggatcctatattcctat

SEQ ID NO: 78759 - DNA, 391 bp, Oryza sativa
agcttggatttattatttttaccactgaatcgggtctcgtactgccgccgggccaagcagaaaaaagatgcatgtacgtgctgtttacacctctcggcgacgcaaaataccggtgcctgtcagttgttttgttccatttgagagttgactaatttattgaaggccacaagcaagaataaactgacgcactgaagcgtgggaactttctcaatattttgaccctcgtgggaacgcacagttattgctccccctccagtcaaagacattgtttatattccagtccagtaaaaaaaaagagagaatgtttatacagttctccatccaaggaagttgtttagaacagcgacacggtatccaaaacacaattttgacttcttatttctataaaaat

SEQ ID NO: 78760 - DNA, 295 bp, Oryza sativa
cattcacttacattgggatcaagcaagcaaatccattgacgcgcactgtatacatgaaaaaactaagttgtgagctcaacgcttatcaagtgatatttcaacgcagatatacattttactttgctagaacaatctcacatatatagtactgactaatagaatcttaatttagaccataagttctaaccaggatagtaaatcttctgaaagagcaaatatcatataccatgtgagtgcatatcggcaacgcacaactcctgcatatgactaggaacagaggccacggcctgccatg

SEQ ID NO: 78761 - DNA, 231 bp, Oryza sativa
agctttttcgttatttctgttagttcgacagttgtgatacggacctgctagattgaaccagcatctaacaactccatggagaacaatgccgactagcatcatgggcggacggatatgatcatcctgcatatcacatatcgctgacattgtgtgtccttaagcgggagatcaataccaataccgacgggatgacacgccgacaatctcggaagacttaacgagagtctactg

SEQ ID NO: 78762 - DNA, 364 bp, Oryza sativa
  unsure (1)..(364): unsure at all n locations
agcttanttccctctttcacgctcagatcttctgaacaagcttacttgctccggactcacgttactaacatgaaactgaactcccactgagattaaaagaagaagataatcttagttaatatttagagaatgtaatttgcaaaagaggacaacatgaacatcctactgctgtctttccccaaggaacaaaagagtcacagtccacgaatctttcacgatgtacacgagcttccttgataggacaggcagccatggaggatcattatacgacacattcttaaaccgaacagttaaacatctaatgacgatcaaggggggggtgttgtactattttctactatatccctcattcctcaaattctta

SEQ ID NO: 78763 - DNA, 386 bp, Oryza sativa
  unsure (1)..(386): unsure at all n locations
tcctatgtcagtgcacgactatacatatccaacaaacattctcttgtgcttcagtatgtattccatagaaagtgcagcttaaacatggatcagcatttacgttggcatcaatatctgcagaggccatgtaanataaaaaacctactacattatgaaaataccgaccatgtaatcgattgtatcgaacttggaaagcgtgatatcatacattggtctaacatcagagaagtggacgattctgctgatttctaatatagttcataacagtcagtactgaaaaactaaattccctaagatcacacatggcatgtcattcagctttacaataaatagatacatgcaatactattctaaagaaaaggttttgctgtatgatgctgtctgct

SEQ ID NO: 78764 - DNA, 336 bp, Oryza sativa
gccttttttttgatgacatcatagcgaggaacactgcgagtgaggcatacacgaccctcagacctctcgttctgatcactcgagtctctttgcgctgcagtgtacagagaggtcgaacatgagacatggatgtttgttaggacctgagtcgctttcttggcggccactcacacacgtggcaccgttgcagtatggtatgacctattgtgtgcatttgttgaatccgccgcagtgatcgtatacctaccctgacatgctttgctatatcggacgcacgcaatagcatcgatagatcatctggcgatatatgcgcacttggattgggcactccagtct

SEQ ID NO: 78765 - DNA, 472 bp, Oryza sativa
  unsure (1)..(472): unsure at all n locations
gacactatgatactcaagctntatcaagctttgttgagtctataacccaaagaagctatttatatacttcagtcctcgcagactaagctagaaagatcgtacaaggcaatgataaaccaagtaagcgaattgaattgataaataatcacactccattattatgataatagcccccgactgacgacttcaagaagaaaacttgatgttgacagtcaagatagggaagtgcaatgataaacttacgcgtagaaacgacgaagatgttcaatgctccaagagtttgcgacgagagtaccatcttctcgcttgagtcgataggaacctggccgggtgacgtcagagatgataaatgggcccttccatagaggagataacttgtgccgatcccgtgtagtttgaatttactcataaccaggtcaccgactaaaaagcacgggatcgacattgcgaatatgataacgccgcaaccctt

SEQ ID NO: 78766 - DNA, 387 bp, Oryza sativa
agcttgtctttctaaaagatttgaatcattagagcaacaaatcattcgagatgttgctcaaactaatgaaggaggctttgccatcacgagattcacttccagccacatattatgaagcaaaaaagatgctgagagacctatgactaggttatgaaagtatacatgcatgtgttaatgattgtgtgtcgttcacgaatgaattggaagaaaatgatgagtgtccagtttgcaaggaatcaaggtggaaggaacataaagggaagatcaagcgagtaccccgaaaggttctgcggtactttcctttgataccaagattacaacgattattcatgaataaggaaatagcttcagatctgcgatatcatagtgatatgcgcgtagttgaag

SEQ ID NO: 78767 - DNA, 454 bp, Oryza sativa
  unsure (1)..(454): unsure at all n locations
tgttgcatcacaatttattataccatgagaaagctagatatatatgcgaacaggcagcataaactgtagagggtggatttcgtacccaaaagatattttctntacaaatgaataacttagattgctttgcatacacaagttctatgaaacaactattcatggctgtctattatattatctctgaaagaaccatatttcactgctgctgtttacattcagtctgaaataactcaggcaacaatatacaatgcaattaattattgacagaagatgaactgatgatatttcaatacaacttcagacagacatggccaaagtatgaatacctgatgaacacataaagttgacctcatcaacagacaagatcgcagaatcattggatctctgatgccatctgtatgaagtttctaggagtttggtaaatccaatatgaatcactatttgtgcaaaataa

SEQ ID NO: 78768 - DNA, 376 bp, Oryza sativa
agcttgctttttgttattacctggatcaccgacgcgaggatgctacacatattactgcaaggctggctaatgagaccaatcatgccaactcgggtgatgcatgtagctgtaatctctgaacagttacaagttgacgctgttatgtgacatgtatcattacctagctgtttatcccatgcatcctgaatgatacgacaccatgttctatacctctccagtgatctatgccggtatcgtgtcgtataatccatcacaaagaagagtatatagttactgatagatagtatcatagtgctgtcaaatgctcattatgacaggactgagtgaaggataagcactgaatgtgggatcataaacagccttatgcactgacggc

SEQ ID NO: 78769 - DNA, 397 bp, Oryza sativa
  unsure (1)..(397): unsure at all n locations
ctcatgtgccctgagttgtaatggacgcatgccatggatcattgtagtatatatatacatctacgccactgtgctatacgctcgtatttttgtacaaattaacttctaattctttaagaatgtgaatttggccaattcgagggcttcttcttgttaatatatccgtgcatctcganatgaccaacgtgtcttcgtgatgtaccagtccaacgttcaaatacttccagaacagttaattggtgaatacatgttgggttctcatagatcttacctatggcaaagattcatgctcagcacttgctcatggctagttctaccccagatttaccgtataagtatattaaaatgtgacacttgcactttctggaacatgcattcaggattcatgacatataca

SEQ ID NO: 78770 - DNA, 386 bp, Oryza sativa
agcttgcttctgatgatgtaaaggcctactcggtgctcagcgtatgcctcacctatctatctttctagaagcaacttaacaagatattccaagtcacacttgttctagctaagagattatcgactccccaggcagtttcacccgaagggaacacttctctacggataccgattctccagacgcctatgcgagatgcacgctaaaaacgagaacaaaccgaagagggtgctcctatagggtccttatcatatacacttgtctagaacagacgtgcaggaatacttatggaaaattacttcatattaaacagataagcttacatacggttgtccctttcgggaaacccgaaagtaggtacaagcaagctgttcttaccttacacagcg

SEQ ID NO: 78771 - DNA, 357 bp, Oryza sativa
  unsure (1)..(357): unsure at all n locations
nntcagctttntagagataatnacaccctagatacactatacttacacgtggtactatagtgnaattatagtgtcactacaccaaaatctttcttttaaaataattaagagtacaccctaattacactgaacttatgaatggtactacagtataattataatgtaactacaccaatatctttcttttaaaaaaattacaccctagttacactgtacttacgaatgtaactatagtgtaattatagcgtgactaatatgtaattaatatgtaagtacaatgtaactaatatatataattatagtgtaactaataatataattaatatgtacataccagttaactaatacagtataact

SEQ ID NO: 78772 - DNA, 387 bp, Oryza sativa
agcttgagtgtgttttatttttgagctggcactacctagtagttaatatgaacgcgcatatttatgagtatgtttcttattctctactaacaatggcagggatactcaagataattggggatagctgtgctcaacattgacatcttcgtcgagacatgaggagggatcaacatgaccattatgacgaaagtgataatgttctatgtaagagcaaatctgtactgccttatttcgagggaaactatgatcctcatgcttacattaattgggagctagcggttgatagtgactttcaaaagcatgtgttgtctgagatacaaaaggttatgtgtgcctcatagaattaaacatgcttctaatgattggaaacatctttgtatgcataac

SEQ ID NO: 78773 - DNA, 289 bp, Oryza sativa
  unsure (1)..(289): unsure at all n locations
ctcagctatcttacgctgaattgataagtgctatcttcagaagaactgttattgtatcatctgaggagtcacaaccactcacacatgtcgacgtaacctgatctcagaccaatgctgggtgtgcactattgacggttaacgcactcatgcagacgaggactacttcctgagagtgaacggtgggcatccatggngtaacgaccatgcgtggcacacactcgacgatttcgcttcgacactgtgtgcaagccgcacaaaggctcggcatggctcatgcatagagctcgct

SEQ ID NO: 78774 - DNA, 388 bp, Oryza sativa
aggctagctctatttattagccccaacaccttgacatacgggctgtttagttcccgaaaaaaaaaaatttggacgtcgtatcatgatgttatcggatgtccgatggagccttcagtctcgattgaataaactacttacgttactcgtctggataccgcgagacgattcttctgagcctaatgtacctcgcgtttacacacgtatgttgcattatggctattgatggataaatagggctcacattatttatcttgcgatgactctcctatgtgtgtaatgagaatattgatctatacttaatgctgtctgcatatgtccacatgtgcgatgagatgttttgggaaatatttctgtggagctagacgctgccatagatcattccttgaaa

SEQ ID NO: 78775 - DNA, 89 bp, Oryza sativa
ccttaacttgtatatctattccgattgtcatcctccacccgataaaccatatacaacgactccctctgcctgctaaaccagcacgtatg

SEQ ID NO: 78776 - DNA, 333 bp, Oryza sativa
agcttgtgggtctttcattcccgaagaacatggaaatagctctgtggtgtatgatccaagcagatattctgcctaagagcacttttacctccacatccaactgccaataatgcgatgctacctgtgccttttatacttggaaatcctcctacaaccatggactgatcaaagaagaggtggactatataatatcgatctttgcaccgccaaataccttttgctcccacaggatattgtgtgtagaattatcctagttcctgcagtgtcaacactcactagtgttgaacctgaaagaacacccaagaaatttgtcgctttatctacatgctcttg

SEQ ID NO: 78777 - DNA, 370 bp, Oryza sativa
agcacaggcatattactagttaaatgcaatcaagataggtatttctgttcaaaatctgttgggcccaaataacggtgcaagtggaccatcttttttctaaatgcatgcttactttatgaatgcaactattaataccatcctcattgagaccttcatgatatattccatcttttacttctatttctgaggccttagctcattatttatttgtcattgaattaaattttcctgtgctttcatactgaaaagtattactggcttcatttcaaaatacttgtccttctaacttcgtcttaaacatgtatatgtatgaccatcaattttttataattcatatacggtaacattatattaatattttttacattta

SEQ ID NO: 78778 - DNA, 478 bp, Oryza sativa
atgcatatctggatctggatcctgcataacatacatataggatgagtagcatccgatataaatataatactcgagacaaactcaagtagtttaaaatatttataaatatgtatctcttctcttgacaattgtgattgccccgagcagatgacttattacgtataaacactctgcccgactagtcatagacaccaagcaccgggagtcggcctaagcacttcccaaacatgcatatgagtgacatgagttcgtcattaatggaacaaagtttcacgggtcggagtctactactcgggtacttttgcaattattaagagcggaagagtaaatatcttatctctatgcttgtgagttattccaaaaatgcttacaccttgtgtattcggtcatgcaacagcccccggtgctaggatctgccaaaggaactatccattgcaaccaaacggaagatatgaaatgaactccttactcgatagac

SEQ ID NO: 78779 - DNA, 383 bp, Oryza sativa
  unsure (1)..(383): unsure at all n locations
agcttgtatctctttggattgagagaggggggaccgctccaacaacgcgaggaatcgacctacacaacgcggtgcccaaacccaaagctttgcctcgcatcaactccccgcgcagaggtgcgcgcacgtgcagaaagtccacgcctccctacgggcgcgtgctcctcgacgctttttggcggatggtctaatgtggagggctggnggtgcggtccacgtccccgtgtcggccatgccctaacaggctcaatgacaagatgaaaccgatgacggtttctaatcaagaaagggaggatgataaggacaacactagctcggatatgaccatagctaccttatgtattcatcaagcaaaggtgcctgctttctatgtgagaattacg

SEQ ID NO: 78780 - DNA, 421 bp, Oryza sativa
  unsure (1)..(421): unsure at all n locations
aactcaagctngggctggagccgtagtactactgtactatgagttgatatgatataaatatgagtacatccatattatggattccataatgtaaaaatacaaagtgtcctacacctgtaagagctatttatatactgcgtgaataactttataggaatctattaattggctgacgtaaccatctacataaagccgaccacatacaatagacaattcactcttccctcccttatgatgctgctactctgtctcacagctgcttgctgccatgggcgaagggagaacgtggtgagcccactatggaaaaggggaacaacgcggcgagcgatggattctaatctacatgtcatctaaataactatgaagaaatcaaagaaaaatctacaagatgggtaacatgtaaatacactccgaaacatgc

SEQ ID NO: 78781 - DNA, 375 bp, Oryza sativa
  unsure (1)..(375): unsure at all n locations
agcttgttatttttattactacgactatggaagcgacgtgcctatagaatatttttcatacacacactcaatgaaacgggcgggatacgtgttcgtgtaaaatcagaaaagggaagttgaaaacatgtatttgctggcacatcctatgcaaatattactgccgctgcattatcatatctcttagaaaaaacttcanagcgtgtagacggattcccagctcatgccgtgccagtgctcgacaggcgacagttcagcgactctataacaaactagactatgcactattgctgccatggtacggatgaacctgaagtaatttgattactacacacgaatttatggtcgtatagagatgagatctgcggatcgactcac

SEQ ID NO: 78782 - DNA, 312 bp, Oryza sativa
  unsure (1)..(312): unsure at all n locations
tacatatgctgtctcttttttaatgacacggggattaacgcggctgaacttcacacatatatagctgcgagaatactaggaaattccttaccgaaagacagaggactccctctacggctctacgcaagattttaagccccttccttatgacatccacaaaagtttacagnagaagtacttatacatatatacctaaatgaatgtggcaagaatttgtcacagaattgcactgctatgataaaaatagacgcgaatattacgaaatggtttgctctcacataattacaaaatgtgaggcttcacacacaagtc

SEQ ID NO: 78783 - DNA, 262 bp, Oryza sativa
agctttctgtatttcatggtcaccggttacaccatttgcagaatcgatgtcactgttgcgacttggacaacttgtaccgtcttccagcataactcaatgatctatctccatgtgaagatcctgcgtaagcgacgctgacttgcatcttcttgagagatcgatatgaatgcccctgtggggaaatcgtaggcgacgccctgctacttaagtactgtactgaaatggtgagattgcaacaaatgacacgagatgacgacctcat

SEQ ID NO: 78784 - DNA, 333 bp, Oryza sativa
agcttactcttttctgcaccgagcactacatagagagaaggacagttttctcatagaagcataatcgtatgaagttgggcacttaacatacagattatgcgtagatgcgtgaacttttttcataacatcctacagcaagcaagctgccaagaacgcatactatgaaatacttgcccatcatgcaacacttaaacatgacaaattgtgtcatacaggatctgcttcacagaagttagacgaaaggatatcgttgctgctatataccgatcagagggccatacttggtcgtatagctggcattgctaattctggggttttattgagagagtagtg

SEQ ID NO: 78785 - DNA, 246 bp, Oryza sativa
agcttatcttgtcgcgactggatcacgagactgtgctgtgagaccactacttgtatggctattttaacatgaaccattctaagtccctctgagcttcaaaacaacgtcgttctgcctttttatgtcgccacataacataaactggtacggtttgatggccactcgtctattgggcgtggattaaccagaggcacccttgcttttttttggtagaaaagcccaatcaaattggaatgccacaagaat

SEQ ID NO: 78786 - DNA, 386 bp, Oryza sativa
agctttatatattttatttcagtgagaacttaatataaagggcagatttagtatatcgagtaaacatacagtaaacaacataaccaaattaggttagatcggctgaaaccccgatgctatctctaataacaaaaacaaactagatattatgattctaagtattacttaataggtcggacccaaccgatgcagcattaagcataaatagaagcataagatctatacaagttgatgaaaggattttgagatggtagatgcactatataatctaagtcaacgttgatatctaactctatcggctgctacctgagagtagatgctggccgatctagggttacatagcaatattgatctatattatatagcacatatgataactcggcaac

SEQ ID NO: 78787 - DNA, 393 bp, Oryza sativa
  unsure (1)..(393): unsure at all n locations
ttaaaactcagctgatcttatgtggtgacaccatttagcttcttcnatatatttgccctttagcaatcttatcgaattacattactttgttttatcaaagagctgacctttcattgctattacagtcggttgccatctgttattaattgtcctctgaaacctctatgccttattggctctatgttgataggaagctatacggagtataccgaagtgctcgttcccatacccaaacagtgcgcacggataacacatcgatccattaacgcacaaataattaagcattatctacatttcttataaacaagaccaatatgattgtttgaatcaacattcgtatacaaacctttttatataacgtactgtttatcagtttgataagcacacgtggag

SEQ ID NO: 78788 - DNA, 388 bp, Oryza sativa
agcttgatcgatttttcttctgaaacaagaagatctggaccgggaggtataagatcaatcacttggcgtccatccgatgcatcgactatggatatttcatatccccccttttctttacgcagtatttttcttactacacctgttgacgttgcattatagaccgtattgttactcttgctaccatcaggatagatctgtcccctttctcggtttccccccacatatatgggatattttaagagatgaacgtctttcttcatagcagggtcgggggaaagaatgggaaagacgatttcactatatttcttaccgggaacagggcctatcacaagaataatttttttattgggacgataactctgaaaagagagatttcctatcttttctt

SEQ ID NO: 78789 - DNA, 217 bp, Oryza sativa
ttattcaaaacctcaatcatcacattccctctcttccacttcacacctcggaacgcactgttcttatagagagaaaggggctttcccatcttcttaacccgaaatgaaatggctgatgagagggaggttccttttggggggtacccccgggaagagatccagtggagacagggtgggccctgtactcagaggattagaacacgtggctactaaccac

SEQ ID NO: 78790 - DNA, 387 bp, Oryza sativa
  unsure (1)..(387): unsure at all n locations
agcctggcatacttttggtggtcccgcgaccttcccaacaccagacagagatgttgtcgatggtcctcctctgattgcgaggacactagaatggcgtcgatgaagaccacatcaaacttatctaagtacttcatgaacacttgtgttcatcaagctcatgaagaaagctggagcattantcagaccgaacgacatctccgtgaattcatacagcccgtatcgcatggtgaatgcattcttcgggatatcttcttcacggatgcgcaactggtgatatccagagcgaagatcaatttttgagaataccgcggcacctttaagctgatctaacagatcatcgatccggggaagagggtacttggttttgatagtaacttcattgagagc

SEQ ID NO: 78791 - DNA, 389 bp, Oryza sativa
  unsure (1)..(389): unsure at all n locations
agcttagtgttctttctagtgaaattgtgtggtcaaggacctacagatagtatgctacatgatccgagatcctgaacaaccttgtgcatcttttttcgaaatgcatgcttacttcatgaatgcaactattattaccatcctcgtggaccttcaggatatagtcctgcttttactagtattgctgttgcatggcccattatttatttgtcatggaattaaatttgcgtgttgctttgatcctgaaaagtattactcccttcatttcaaattacttgtcgttctagctntgtccttaaacatgtatatctttgaccatcaatttttaaaaactcatatggtttaacatcatatgatntttttttagattcactgacaaatactttaataaa

SEQ ID NO: 78792 - DNA, 307 bp, Oryza sativa
tactttccgagtgtataaatgcctactatatattatgttcatattatactgactatactgctagcttatctgggagatgctgtggtgcgggtataatgattgcatatgcaattactctatgtcatgacgatgatattagagtagcatctcggtagttagacgccatgtctagaatacgggatatcattatttgcggttatatgctgcagatgagaggtgggccgcttattgtgacagctcactacgggtattcctccgcgcgtgatataatcctaagtaattcatagggagggattcctctgtatta

SEQ ID NO: 78793 - DNA, 393 bp, Oryza sativa
agcttgctggggggggcgcatccgctctatagctcgtatcttctcggggttggcctcgatgcctcgggcaaagaccaaaaacccgagaagcttgcccgcaggtacaccgaacacgcacttatcggggttcagttttatgcgggcggagcggagactctcaaaagtttccgctagatccgagagtaaggtctcttggttgcgcgtctttacaaccaagtcatcgacataagcctcaacattacgtcctatttggctacccaaagaaattctactagtacattagtacgttgaaaagtaggacctgcattctttaacccgaaaggcattgtcgtataacaataagttcctatgggggtaatgaatgcagatttttcctcatcctccctagccatg

SEQ ID NO: 78794 - DNA, 445 bp, Oryza sativa
  unsure (1)..(445): unsure at all n locations
tactcaactgagcaagctcatattattagcagaaactggctcngtcatcatatcatctgtgttatcatgagtacttatcttgcataccttgacatcaccttcagcaatcacacatcgaataaagtgatatctcacatcaatgtgctttgttctctcatggaacatttgatcctttgtaagacatattgcactntgactatcacacaatatattaatgcaagacgtaactccacaaagcttagtgtacaaacctctaagccaaatagcttctttacaagcttcagaaatagccatatactctgcttcagtagtaaataaggcaacagttgcttgcaaacttgccttgcaactaacagcacatcctccaatagtgaaaacataacctgtgaacgatctttcctatcaaatctncatcaaatctgaatccactaacctacaagtcatc

SEQ ID NO: 78795 - DNA, 77 bp, Oryza sativa
cacggcaatcactcgcccgggatcttaagcacctgagctgcagctgggttttttgatgagcactccattagttcgtg

SEQ ID NO: 78796 - DNA, 388 bp, Oryza sativa
  unsure (1)..(388): unsure at all n locations
agcttgcttttgcagcgggcaactccactccacaggcatccttgacggcagcgacgaaaccaatttcaacaagatagctccagctgcaagactcttgctctttcgtaaaaaaaaataatgccataacgcttcataacaacacaactcaagctgatgaagactaacatgtgtgagtggtgaaatcataaactaccaactccctatatataaacgcctctgatatgctatctattctccaacaacatattatccacatatatctcaaattagaaatcatttggtgagatcagccataagtttggtccattgagtgaattggcccttgatatccataacagtagggctaatgcctttcantaaaaacaagataaaaatcatgatggttgat

SEQ ID NO: 78797 - DNA, 353 bp, Oryza sativa
  unsure (1)..(353): unsure at all n locations
tgatcacgtggcggcggatgcatgggtggcgcccgcgactatgacttggtcgatcttgtccttgatggcagccacgaagatacacgtatgccaatgagtgatgaccaacgaggatacttccgtcttgtgggcgagatcacatcaccggctgcgatgaccattatggagacactccggtcgtgccggtctgagagtatgaccggcgatggcgacgagtcggaagttgtcccgacaacggtgtacatatgaacatttngtcaccgagcggtcgaggccgatgagtgtgatactggtgtcgttggcatgaggatgacntcctgtgatgaagcgaatgcatcgtggattggcagcac

SEQ ID NO: 78798 - DNA, 283 bp, Oryza sativa
agccttgttctgttctgcccaatggccgaacgggcagtggcgcacagtctctctccgaacgctagcggtgacgacggggagcataacccgggccgtcgggctggcaccccaccgtgcccctctcgccgaaatcttgggcggtgggaggccgctcatggaggtcggaggatccgtgacttcgccgcccgcgggcgactggggaggactaccagacagggcgcgtcaccgcctcgtctacagcgatggcagcacgccccacggcgcgctccacgctgggggcgcg

SEQ ID NO: 78799 - DNA, 297 bp, Oryza sativa
tctataatatggacgttgatcccccggaagttcagcttatctttacgtctggataacgatgtccgaacagataacatatgaactactcctatatacaacttaccagtgtcactggttgattgatactccctccgtcttgaatatagctattgtagcacagtgtctggctcaaaatataactatttcttcacataccttatcctctcaaccaatcacaatcctaccaatctggcatatattgattgcattggctgcaatctccagtcaaccatagcatgcatatctcttttaagaatg

SEQ ID NO: 78800 - DNA, 373 bp, Oryza sativa
agcttttgttattcgtacgtaggtaatctaactactggctgcgcgattcgacctgaaccctaacaaatgaacccttgactgatggccttggaccatgagacggtcctaacttactatacctgtctagcataaatcatctgatgctgtatagtagacaaagatatcagcttatagacaaactatactacgccctccatctctcactatatgacgccatgaacagcacaagatctgagaatacatgctcaagatatttgaacctcagctctccagaagatagatcctgaacttcgtataagagttcattaggctcaataatgtgcataaacgatgcaaaaattatggctcggccgcatacgtggccataactggc

SEQ ID NO: 78801 - DNA, 387 bp, Oryza sativa
  unsure (1)..(387): unsure at all n locations
agcttatatgatggggaaaaaagagtcactttccatcgtttggcgctctgctcataagtcagttctaaagtttaaattntaaaacttaattttgaagttgattataggtttattttttatgttggtttttaaactgcaataacacaaacataaagtttaccaacaaatcttttttcttctgttgcttatatgtcgttttatgccctatcagacaagatcatgcaaccgaaagtaagtaccaaggatagccgtgaggtaatcaaaaaagatttgaaattactttttgtcaaaataacgagggggaaaacatctacccgtaaaaatctgtctagagcaaacgcttcgctcttattatgggctgtgaacttagcaaaacaaaacggacgg

SEQ ID NO: 78802 - DNA, 388 bp, Oryza sativa
  unsure (1)..(388): unsure at all n locations
agcttggactccacaacatatgaaagataatgcttagttaataacattaatctacagactgataacctctttttaagcactaaatctctggtactgtctgaactagtaagcattattaagcaggcatgttagattgatgtccctattctgttagatagatcagaaaccaatagaaaatctttgagatgctccgtttcatataccactacaatntacccaatcctctcataaactataatctgcgtaaaatgtggccgtgtttatttcttatatcaatataacctactattattgagggaaattatattttaatttctgtaaaagaaaaactggagctggtcactctctaaaacgatttttgaaaaaaatagaagcatcaccacagtct

SEQ ID NO: 78803 - DNA, 60 bp, Oryza sativa
gagagagagagagagagagagagagagagttgtgtgattcttgctgtctaaacgaggcga

SEQ ID NO: 78804 - DNA, 382 bp, Oryza sativa
  unsure (1)..(382): unsure at all n locations
agcttaagttggtgattttgattatcgtgcacaaggtactgtgctgattacgggaccatatcttcaggtgtgagtccgacctactatatcctgcatccacacagatggatcttggatcgtctactgtggagagtacgagactcacaattctatttctgattcctacgtactatngcctggcgactcatacataaataattttggacagatcagacactgtctacaatgagtactactagtctggatcacgcggaggctgatatgtgtagaatctcttatattctgagacggagggagtgatagacacgtacctacgcactcaccttttgttgattgccaattcttgcattacaatttagcgtaaggaaattatactctagag

SEQ ID NO: 78805 - DNA, 392 bp, Oryza sativa
agcttcctggttgttttctgccaggctatgcttgctacattaccttgttgagcgattgacatgaactgtgcactctcaaatgcgaaaatataagtcccaagcaaaaccccgctaaaggaaagctggtaacggggatcgattgagtatccggatggttgcggctggacctgcacaggagctggtccaccattctctgctctctgagcagaagcatcatgcaccctactaccaagcccctttctgaactgctcctcctcccatttactctattactcatcctcatcgtcatccttttcatactcaacctccctgaaaccatcattgataacccccatactggcagcaggacctctattattgatcacgccaaatacacctttcgtgctcctctg

SEQ ID NO: 78806 - DNA, 386 bp, Oryza sativa
agcttgaagatgaacagtaacggggagacaaattagactttcggctgggcttctacttccaaggactgattaaaggagggaaaaaagcagacttctggaaagagagggaaaggactgcaggctgagaggagactgggccgaaagtgagacgacttttcctaattcggcccgaaaaggaaaaggtgaattttaattacttttccaattaaattaatcactgaaatgatccttgaattgttaaaaatacttatattgctcaaataatttcaagaaaaatattgaaaatacttggaccctcaaagtatttaaaaaagttataatcagaccatttaatgattaatttaatatatggataattactgaaatgttctttgtatgattaaaat

SEQ ID NO: 78807 - DNA, 436 bp, Oryza sativa
  unsure (1)..(436): unsure at all n locations
tagatgcatcgcatacacttggatacccttcnttggatcaggcaaaatcataatgggtgctgatattatgtgactnttcaactctngaaaactctgctcacattcttctgacaacttgtacttcacgtctttctgaagcaggcgtgtcatgggcttagcaatcttggagaaattctctatgaacctncggtaatagcctgcaagacctangaaactacgaatctctaaaactgtcttcggttgtttccaattggttacagattccgcattactagggtcaacgacaactcctccagctgagatgacgtgcccaagaaactttacttcagacaaccaagattcgcatttgcttaaactggcataaagctgatattctcgtaacttctctaatgcaagacgaagttgttcttcatgctcttctttgggtcggagtaaa

SEQ ID NO: 78808 - DNA, 373 bp, Oryza sativa
agcttctaaacgggtcgatttatttgaatgtttactatagtttgttattttgaaacgaactttataacagttaatgtgtattcgtttgtacctcatattaattgtcataaatatcggatactatatcagcttcctttatttttttaaaaaaggtcagatgaaaaagaacttgcgtcttggccaataagtgtgtgtactcgcgtttagtaggagcgctagcacaacacccactggaatctcacatagcaggagacaaaggaagagcacacacctccaggctcgctcaaccagcagagtggacatgactgcacacaatggacattctcgaacagggcaaatatcgttgggagcggcacggccaagtgacaacaat

SEQ ID NO: 78809 - DNA, 239 bp, Oryza sativa
  unsure (1)..(239): unsure at all n locations
tctcnggttcttggtctctgcccgaggcatcgatgccaaccacgatgagaatcgagctattgagcggatgcgccgccccagcaaacttatggatgtgcaatgcgtcgcctgttgcatggtccgcctaagtcgcttcatatcaatgctgggagagaaagcgctacccttgnttaagctcctcaagcgctctgggccgtttacttggacggatgaagctgaaaatgcccttgcccagttga

SEQ ID NO: 78810 - DNA, 385 bp, Oryza sativa
agcttgtcgttgttgtcataaagccggctgacccacaattcacaacaatgcattcaagactgaggaaccggcggttctttccctacttcaaggattgcataagggctataaatgggactcatgtaccttgcgtggtgccaagtaacaatattgtgcagcacttgtgccgcaagggcatgacaacacaaaatgtgatggctgtctgagacttagacatgacgtttacatttgtactatctggatggccacgttccgtacatgacatgaaagtatttgatgatgcccacacaacatacacccatgtgtttctacatccacctacaggtatatgcttgaatgagacttgttcctactttgttattcgaaatatgtcatactaactcat

SEQ ID NO: 78811 - DNA, 380 bp, Oryza sativa
agcttgttattgttgtctaagaagaacctccttatgattcccttgacaccaagaagaacaagaagcaacttccagaacttgaagatgaataagttctatcataaggcgcttgatgaatcatttgggctgcccaacaactatacgatgactgatgtgagagtgatcacgatgatggcttagggaacacatgcataactgatgtatgactcatggctatacccgcggatgaacattgcgagtgtgatcatgagcgaacacagactcctagtggtgaatattttcacgaagctcttgctagacttggttctaagagttctagacatgttaataacattaatcaatgtgaagctactattgaactccttaatgctgaacatgct

SEQ ID NO: 78812 - DNA, 314 bp, Oryza sativa
gttgtaattgtgtgacgctctatgcactcgtcagtgccacatatacatgccatcatggaccatgcacacgatatgactaatctacccttgctaagaatgtctgtagtataaactgaatcaggaataatatttggacacattgctttattataagctgagtcaggaataatatttggacacattgcattcgcgaatcagatgcatcgtgatggatgctgttcacttttatgatgtactatattatagaccgagtacgctcacatcagttaacaaatcaatatttgaagctatagatccactgaaatggatataac

SEQ ID NO: 78813 - DNA, 388 bp, Oryza sativa
  unsure (1)..(388): unsure at all n locations
agctttatttcttattattntcaaacaaatatatcacgagataaaaaataccggtgcgttacaacgaggtgaatgctattataatcttatttctgctatacggattaattaaggtaaaattcactgtgaaaattcgcttggatattttttttataaaatcataagctacaattaggagtctgactttcatttcaagttagcatgcgggattttaaagagatttcttatacgactccttttgtattttcaaaaacaaataagtttaaatccaaatcatacacggatctatatttttaaaagtgaatgaacttaaaaattgactcaaagtgacgtatcataatattagtaaaaacatcttcgacatatatatatgatcgtacagttttct

SEQ ID NO: 78814 - DNA, 278 bp, Oryza sativa
  unsure (1)..(278): unsure at all n locations
gttgaccgcctctccctgcacttggcattctccaccatgcgttccaagaactggtcaagcacgccggcgcctagagggatatcatgcgaatgccaccgcacaaaattatcgctggtcttttcgtcgtcgaacccatcaaaagatagaatcttttcgaccaattcgtgtagatcgtgttcgtggctatcatctttggctgaacacaatgtacgctctngagataaatcataccatgataaagtccgcgcgagtgatccaataggaatagatcttgatag

SEQ ID NO: 78815 - DNA, 383 bp, Oryza sativa
agcttctcttactagcgaaagaaaagtgctgacgaaggaaataagtcaaagaggggtggtccggcaaaggttgtgtggtatctacctatcattgatcgtttcaagagaatctttgcaaacccgaacgaagcgaagtgtcacaccctgaaaattttaaaatttataaattgttgtttaaatggaatttctagaaataattttaaaagtcttgaagagaagatcttgttttaattaataaattccaatataaaatggggccagataaaatttcattaaatactttgcttaattctataattcctagatttttctgggatttatttgagctaagaaagtatttttaataaatggaattgcatttaagaaataatttatattgaaaa

SEQ ID NO: 78816 - DNA, 388 bp, Oryza sativa
  unsure (1)..(388): unsure at all n locations
agcttattttcttttgtggcaaatgctcgatcaaacacatactgattttggtcttgacttccaaccaatggtagctgtgaaccaagcagcatgctcggaatggaccaaaggtgtgcccttgttaactctcttgaggccagtggtggattgagttgaaaacttgagttacttgaagcatacctgctgacattctntcctttttctctgttaaacatctgttacagggattgaggtgagagaggaaacaagccaggaaagaatataccagaactagagacaggaccttacaggaactaactcttcttgttgatgtgttgcttgttttgcttattctgcaacgtgattaagcaaacaacctagcatggttacatcacaccccactgatgca

SEQ ID NO: 78817 - DNA, 303 bp, Oryza sativa
  unsure (1)..(303): unsure at all n locations
gttgcttcaacaattcatatggacccagttttgaaaaacaaagcttatacttaattaatcacgcctctatggagcgctccgttntctgtgcgcaattcgcatgttgggaacagctgattctaaacacagcgttgattcgtcttcgagatggaaaaggactaccacagattcgtagtgtgtcaagaaccagttacctttgggtacatcatgcgtgagttcctgtagtnttggtgaaacatcaagtttattatccattttgtttgcagaaactatcgacttggtatgttataataaacttctcat

SEQ ID NO: 78818 - DNA, 163 bp, Oryza sativa
agctttggttgctgtgggggtggtggtggtggtggcgcattgggctgcggcggattctggatgtggtggaggaaagcagccatcatgttggcctgctgggcgaggatttgggtgatgatggggtttgtgtaaagtggcggtggtggtggcggatggggaggtg

SEQ ID NO: 78819 - DNA, 260 bp, Oryza sativa
tcattctgacttcatatgaattaattaccaattttacaagagtaaatctaattaaagcctatttaacaaggattaaataaatctaacacaatttatggataattctactatatagatatttagtttatacactcttgcaacttgaaccacattaaaccgagttacaatgaattagttatgaaattctaaagattataccgcattaaagcatctatatggattttaattgaattatgacgcaatatagaattactttgaaa

SEQ ID NO: 78820 - DNA, 382 bp, Oryza sativa
tttttttcttgtacctcgatgcccacgagccctcttctgtccaacagagggttgactaccactagccttctcctggtttccctccacatccctttccacgtgcccctgctggttcccctccgcatccctcttcacgttcccttcctcgttcaagtactggtttggatcctcgatcccctcttcttcattccagtactggctgctgtcctccgcgattgtatcgtacaacatctgttcctcatcgcggtcagccatctgttgatacaagaaacatctgctaagtcacgagacatttatgttttaacaatctaagtcatgtatgctaagtgtaaatgtcgtacattagaaccatacacaaccttacgtgctaagtctaattaca

SEQ ID NO: 78821 - DNA, 341 bp, Oryza sativa
ttactcgacccggatcttaaacgactgagctgcagcttggtttttacctgtttaccacaaaccgaatgacaactgatcttttcattaaatgcaaaatgcacaagccctgatatacctggatgaactcttattaacagctataccgatgcctattaccatacattcctctatatccctcaatactcttaatacagtagctgaagataacacatacactacaagcaaactagctactgtacaattaaggtcaaacaggacacatcacgccacctgcctctcccgggtggggtggcgtgctggcctaccgggctaagcgcgcgggtgcaaaccggaaatcactg

SEQ ID NO: 78822 - DNA, 452 bp, Oryza sativa
gcttcccttctctgaacctgtgtacacctcgcatggcgtgactcttttatacacaaattatccactgcgaattgcaagtcacggcgacaggtatctgcattaccttatctgcccggactgtgccaccctctagattattccgaatgattctgactttagcttcagcttctctaggatatcaatccctaacacttgactttcttcaacattgtcccacaataacgtgtgtcgacatttgcgcccatacaacgcttcatatggtgccacttgtatgctggccagatagctggcattgtacgagaactcggatatgggagactcttattccaggtctctcggaatcaattcacatgcgcgaacatatcttctggatctaattagacgctcgtctgtcatctgtctgggggataagcgggctgaatatatcggtacccactcttctggaacttttc

SEQ ID NO: 78823 - DNA, 389 bp, Oryza sativa
cagccttacattatgtagcatggcgttgccatggcttcccttcatgccttccaagccgtcagggagaaccgacaggtcacagtagtacaacttgtttaccggttatgaagattctgcgactgacagaatcacatactgcaacaagtgaagtgatgagatatctgctcaagagtagctcatgtttgtcaatgcttagaatagattcagagatgtacaaaacttcgttctaagttgatcgactcatggccatagctgcataccttgccatcttctgaaacttcacgggtgtaaatgtacttgggatggtcatggtcctcccagcacaacacgtcctctgactgatcggttcctagagaatggtgatacacttcatgattgagattaacact

SEQ ID NO: 78824 - DNA, 418 bp, Oryza sativa
actcgacccggatctctaagcaccgcagctgcagctgaaatttgtctttgttgaaattctcgagagaactgagaaagttgaaacacaaggtggtgaaggggaggaaagaaatgaacttcttattgcattcaaggcatgttctgtgcactaccatatgacctgtgattcagacatcatgcttaaattctatacttctgttcatatttctttttttattttttgtgtggataggttgccaactcttctagtggtgaggatgatgccacattctggagcacattaattcaaccagatgctttacatatggttgaggtatttatttggactaattttgtgttactgcccttttcacagttgaaaaccacgtccagctgttgtctgacagtaacttaatcatatagttccctgccaaaaaaat

SEQ ID NO: 78825 - DNA, 388 bp, Oryza sativa
  unsure (1)..(388): unsure at all n locations
attagcgacctataaaactcaagcttaagaattgtttactgtnatcacgcacctaatcttgctcatggagtcttaccttctctctctgcctgaacctctcgcctagcaacacgcaaacaagtcttgtgaaacgtatttgccacactttacacttcatgctgctgtgttagctaccaaatttaatgacccatattgatctgtctcatgtgcggctgcagtgcgatttcgcctaacttattcccaagtaggctaaccccactgtcacaccatgaacagacttggttagttattgtcttttctctccacagcaaagttgacaaatactagcgtaaaaccaccaaggctgtgtttagttccacgctatatatcgaaagttgactaaaaatta

SEQ ID NO: 78826 - DNA, 390 bp, Oryza sativa
agctttgttgtgtttcatttgaaaaaatgcctctctaacttatttttcagaatagtttgcttttaaagccttattctcaattcgtgccacttgcggaatatcctccatcctgttctcatcaagagagaattgtgttttttcagatggcccaaaaagacctttataataagttgtaatatgcttttttaattcagcatacccacttattatatgatcaccatctagcaattggtatattcttgtttttctttgcttaccattagccagcaactgaaagtatttggtattggaatcaccttccaacaggtcccttactttagcacgttggtaccacttaatctcctcatatcttagaagcatagctaatctattattcagaagcatgcctct

SEQ ID NO: 78827 - DNA, 365 bp, Oryza sativa
  unsure (1)..(365): unsure at all n locations
ctctcaacgacttnccaagtaccatttnacataatcgagtccatttcactgcgtactgcttccttacagtagtcagcgtcatgagatgaatatgcctcttctatgggtcttggagtggcattcacgaggtatacaatgtagtcatctccaaaggattatgcaaccctttgtctcttactcttgcgagtatctacaatgttgtcctcctcaagattgtcctcaagcgtntgatcattgtgttctatcggtgcanagtgctcatggtgcatgacagtttctttactagaagtgctaggtgtatgtttcataggaaattcattctcagagaatgtagcatctcttgactcacgaaatgtaccaacatg

SEQ ID NO: 78828 - DNA, 383 bp, Oryza sativa
agcttgcattagtgtaaccatttacaacgagctcttcctgtcctccataaactaggaacatatccttagttcttctcaagtacttcaagatattctttacagcaattcagtgactctcacctggatctaatttgcatcggcttgtagaatcagcaagggatcgacatcgacggcatttgccggtgctatggctgaagggggacgctggtgtgtgggagggctcgcgggaactgactggtggtgataatggtggcgataccgcttgatgtggcgatagcgatgcgtcatgcgtgcgagctttggtggatcgacgattgagatatgctgtgggggatggaaaggatgcggccatgcaagatgtgggagcgatctgatacgttgga

SEQ ID NO: 78829 - DNA, 517 bp, Oryza sativa
  unsure (1)..(517): unsure at all n locations
aaactcagctntggcgtagagaagcacgacactcactcgcccattattctgtgacttctagatggggaattatcgcaagagatcatcacatgatgctgatacagcagagaacaaggatgcagctaatcaccaggaagcaggcaattccattgctgggataaggaatcaagtggaatggtgctatggactaccaaaggatgagaaagagaagaagctgatgtccaacagcttaccttcagatggngacaataccaaccttggcgctagcagcgagagcatgactgcaactgtggattgcccaaccgccctgcctgcatcatcattgggaagtaatgtgcaaccacgtgatgcattatattgacaaatatagcgctgctgcagatagatatgcatgcgtgatataaatatgttagttcgatatgcatatctagcaaatattgcccatccatacgcatatctacattgaaccagtataatatctgcaacatttccctacttgaataatacatgatttact

SEQ ID NO: 78830 - DNA, 387 bp, Oryza sativa
agcttattttctttagtatgccatcaaaaagatgcagaaccggtacacttattactagcagccttaatcatttgagcattagaaaaatcatactcatcaaattgtttttctactgctagctcccaattaacataagcggcggaatcatacttaccatcaaaactagggcaattagattctacccttgtaagatcattatcatgtatcatgcgtgaagaagtcgctatatctcgttgatggtgaagatgttgacattgagcatgaccatcttgtttccccttgcgcaatcctgccatggttagcagcaaacaagaaacatacacaagaatatacacgctcctatcaactactaggtagtggcagctcaaatctcacacactcaagctt

SEQ ID NO: 78831 - DNA, 409 bp, Oryza sativa
  unsure (1)..(409): unsure at all n locations
ccttagatactaagctttgagatatcaaaaattgcgtgtcacccaaccatagtccctctgctgtccttgcaagtgcttatgctaagtatatntagtagaaaagcagtctacatgatcatttacatgtattgtatacattcttacagaagagtgacggaagtgctgttcccactccatgggctccaggaatgggtaggaacatctgaaagtatgttntgagggaccaggttagttcattctccgtataattattgattgacctctcttgtctatgcaaatgctaattactgtgagttctttgttagcaaactaatacattgtcggtagtgtgagtaatcataattaacaaatatttaggctgattttaatgttctggatgtgcatatttgaaccgcttttgtgtatgcac

SEQ ID NO: 78832 - DNA, 361 bp, Oryza sativa
  unsure (1)..(361): unsure at all n locations
agcttcttcttttttctgcaaatccgaagctaactagctagctgggtgtgattgcatgacgcgtccaagcctatcgaaaggccctacctgtggtgaagatgaagangatttcccatcgccgtgagggcggtcggcgacctaccggctgcggtactcttcgccgtcagacgactgcttcaccacgtcggcggcgaaccgcaccctcctcgtcctctcccgcggccgctgcggcttctcctgctcctgctgctcctgctgctgctgcgctcgcgctaagaatgaaaaagaagttgaatgctagtatcgatttcgattggtctatggtgattttggttgtagttcgatcgatcgatctcaccga

SEQ ID NO: 78833 - DNA, 414 bp, Oryza sativa
  unsure (1)..(414): unsure at all n locations
nttgaacaattcgacactatctaacgggcgtctgtcttcatcattatgcattctccgccatactgatattggtagagntcattgttacactgatggtggccaagagagtggtgaataggcgttntgtaccagcaacccatgttgattactatcgagtacctcgtgttccctacatacatcgagtggaacattgcacccgggttctagctattagcgcacgtgtgcatattctcgacatatcttggctccccctatttcactgaagaatggcgagactgcacatattaacgcgctatttcctactcacgtcatttgggtaagtacaaatttgcagttttattttgagaacattggtcatactattttatagttggaaattgagtatagtatctgacttgtgctgcttacatgact

SEQ ID NO: 78834 - DNA, 390 bp, Oryza sativa
agctttattttggtgggtgcctttcttcgtgcataaaagataattgaattcaagcaccaagctgtttagtttgagtacctcgcatataggttgacccgccctttctggataatccaatgctgctgcattccttgcacctccaccaaactacattttgaaaaaatagcaactacttaattttgatgttccaaaatcaagcgaagctttactacctatagactagcatatgcaaatatggcatcccatgcgcacagacaaactaatcaatttcttaacgaaaacagaaacatggaaagtagataggctatcaatagacatgagtttcataaatcatttagaaagatcacagttgcaacagaagaatgttaacttataacaagaactactgaa

SEQ ID NO: 78835 - DNA, 426 bp, Oryza sativa
  unsure (1)..(426): unsure at all n locations
ttaatagtgtgaccatatcttgtccataatgtcaagttttgctgttcttcatagaaagtcattttcntatgactggagtggagggagtattcattagtgaggacatgaactatntatgaccagagggagtagtcatttatggaaaagagcataacccataacaccatattcgcaattattactaccaagcaaaaattggttcttttaaagaacagaatcctctacacgatggaatgatgacatgacaagcaagcatgatatgctatttcacccatgtggactacttcatagtggctgcggtacaaccagataaagtgaaactgcagatcnggaaaactaactctgagcagacaaatactaaagggaaggccatttggtctcatcttgactctgttctcctaaaaacttattaaacccagccctcca

SEQ ID NO: 78836 - DNA, 379 bp, Oryza sativa
agcttacacagctggcatctcgccttgcttaatgcttagatatatatggatgatgtacatgtgtctccatgattcgtaatccccaaaaacaaagcatatatgccacacaaaaagttttcttttccatgcttgatacatctattagtaccagaatactgctagagcggtgattttatgtcgctcttaccgaataagcagggaattctatgatgacgccaatttttttgcaggtgactttgaattcccccctactagctcatttgaggatgcttacaatcaagctccagagatgattcaccgaacatgtacgtacgcatgcacatttatataaagttatactccctccgtttcgaaatgtttgacaccgttgactttctat

SEQ ID NO: 78837 - DNA, 381 bp, Oryza sativa
  unsure (1)..(381): unsure at all n locations
tcagctctgtcgtacttgtttgacgcgaaagngctttcttattctgcttgcatatngccatatgctacagtggtacttgggctgatatttgctgaattaagacatatgacacatcttttcacatttctacatgcgactcaatatgttatcactatatcaattgcacaggtgttctaccgaattcctcaatgaagtgaatcttacgataggtggtatcctggcaccggaaaaggcactcgcttgctnnttgtgcttgtattggcaaatacacaataaaattcagacatagcgtctgactagatctaattaccatgtcaagtgaaaccgctcaatgtaccaagaatgcatcatcatctgagaagttggcatcacaaataattg

SEQ ID NO: 78838 - DNA, 254 bp, Oryza sativa
ttgaactactgggccgtaagggtgattccggtttgtaatgcttaaatgagaaacgtgcaagcgtcccgacaaactgcctaggcaatcgtggagcacagataatccctgttcccccgaacatgcactggagtggcctgagcgggttcggactaccttagcacgctgggagtcgcgtagtaaactcaagaatgcgggccgacagcgggacatggttattcatgaccaaacctccggcttgatcacgagttcaaata

SEQ ID NO: 78839 - DNA, 439 bp, Oryza sativa
  unsure (1)..(439): unsure at all n locations
ctcagcttctacaatatctccccacccccaaacagtctagatgtcactctgtttctgaantaaatgagttctagaaaatatactagaacccagaagctggaatacccagctttcatattctaagaagctggctactaacgaacatattcttaanatcttaagctccccatacatggatntattggatccaggaatataaaaaaaatcccacgctagccttacctaganaagaatttttattttttaaccatcttaattntntatttaaaaataaaccctttcaaaacttattttcataatctgagcctttacacaccatactacatcagcgagaatggtgtgccaaataacgttgtcacactagcgagatcaacatggccaagttatgctgtcacatcaataagacctatatgacaatatttgtttgctatgacagttc

SEQ ID NO: 78840 - DNA, 387 bp, Oryza sativa
aagctgctcttatttttctttttaaaaacctccttggcttctctatatccttgagtaagaaatgcattcttctcacatattttgaacacttctccggagtagaacaaacagtgctccaggggaacaggccttttgttggtcctgatgaacaaatggcagcaaaatggtatgatgcaaactgtaataggaagtagtttaaaataattctgcacttacaaaggtaaagacactataatccactcaactgatgtatagtaatagataataatacgctgtattattcagttgtaagaaaataaggtgatttggtcttattttcttgaaatgacccccatccagtactcagagtttgctcaattaatccctagcccttccacttactgagat

SEQ ID NO: 78841 - DNA, 456 bp, Oryza sativa
tatataaactcaagcttgttgagacatcctctgaaaaatctatgttgcaacctcgccgtgataatatattgtatctccgagcttatcatgaattgtcgttgatcaatccgaattaaactattggtttgctaatgatctgaataatgtgccaagccagaaaagatatggtttatttatgtatgccttcactcattctgctctttataacagtttacatcaccatgcttatctgcacaatcttcatctgatgactctctaatagaagacattaacacctctgttgtgaaatactaaatgctgatggtagcggccaacttacaatgtaatacatctcatgactgagctcctctgtatatttaaatgtgctataattgcctatacttctatttaagttctatacacccgccccaccacacctatgacctctctgatttatatgacatagacatttgtgtg

SEQ ID NO: 78842 - DNA, 384 bp, Oryza sativa
  unsure (1)..(384): unsure at all n locations
agctttaatttgtatctgctagattcctacaccatcatgcctgatttctgtttgatatgtttatatggatcaatctgtttatttaggtttgtactagagtattagctagtacattatctttccagctataaacactgtcacatctgctactttcagaatattgtcttaaaccaatctattaaacttgatagacaatattacaaccgattacgcatgtttagggtttattattctttgatatatctagtccatagccgatttggtctaactccatcggctgagaccaccaacgatacactatcagcctatcggccgatcggctatcggtcgactaattctactttcattctntcttgctgattgcacgatcaaatcagctggcac

SEQ ID NO: 78843 - DNA, 468 bp, Oryza sativa
tggctccaataaagaccacaagatatgccgatagctctccaccacttgtcattggccagaagcgtgaacgaggcaaggagaatgtctgtgagttggcgccggatccaaaaaggtgcaaggctgcgacgtctatgccggtgagcaaatctgggaaggtcgtgagggcgccagcccaatttgagctacgcatgccattggtggaggacaatgtgttagctgtgatgggtattgcttgccgagagctacataatctatacatggagctaagcattgcaagcggaaaatgatggagtcatccatagttggacatcacgaccaccagccgttcctatcgtcgcctgcctatataactataggctttgatgacctcttctaccttttcaggatccggaagtaggacactggtctttctaaatgctactccttgaaagtgcataccttctatacttgtgatatgactggactata

SEQ ID NO: 78844 - DNA, 270 bp, Oryza sativa
acaagccacaggcttaagacaagacatgcaggaggcgctgattccatcgatcgatcgggagaggagagagatgggcaagacatgggcgatcatcacccacctcaactccatagccgggtatctccgaacaaatccgcactctcaggtccatacctgtgacatgctctacaccgctagtacaatcatcatctatatgcttgagcacgactgccagtaacatgtgtactggttagtctgacgtccctggagcaagccagcatcacgctttct

SEQ ID NO: 78845 - DNA, 380 bp, Oryza sativa
aagcttatatatttgtcccgctgactttattatatataagacaaagtgctgtctgggtttttaagcaattgaatggatacaatatcattgctgttccccacgtaagtgtgcatttttattgaccaatattatggcttacgcttgatatataattggggcattttctaagccggtgggaaatcccttattgaattatttacttagaatttacaccacatatgccatatattttcaagtgtggtgaaaacattgtttgtttaaggaacttaacacaatttgtaaagcagtgtgcgcattgcgtatgcccaatactctggaaaattttttattctcaaacatacaagcttttatagctattttgctatgtgagaattcaaaga

SEQ ID NO: 78846 - DNA, 333 bp, Oryza sativa
  unsure (1)..(333): unsure at all n locations
tctgtatcgctgatagcaaaccagcgtgtcggtcatgcagatcacatacattatggtctgntgtcaacgacacacattntaatgttgccgcaaaaccatagccagcttgatgtgatctcgctctcaacatatgcgaatgcaacaggaacgacatggctatccgcgtcgactccgatcgcagttagaattgttcctctgtacttgcctgtcatgaaagtgccatcaacacagagcaaaggaatgcaatctttaaaggcctctatcatgcacccaaatgaccagatagcccgacgaagaacattctacccatagtcattcacctcatcgagaata

SEQ ID NO: 78847 - DNA, 387 bp, Oryza sativa
agcttgatcttattcttgccaacatgacgatgtccttggcttggtgaccactaacccatggtgtcattcattagcctcatcgtagtgggacctattccttttcacacctcaaaggagaacattagtctcaacaaatcggttgtcatccttcacttgatgaccaaccggttgcatatgaaagatatggatatgtttgttgagtattcattaacatcacaagtttcatatactcgtatgcaagctcaagtgcaaagattcgatataaataataggtgaacaacatggatctagaacatgcacaataaatatataggatttgctccccctaaatatatgcatacaaataaatatacaagagatgcaagtgtatgcataattagagaatga

SEQ ID NO: 78848 - DNA, 340 bp, Oryza sativa
  unsure (1)..(340): unsure at all n locations
tactcaagctcgcatgctattgatgctctctgcattatcgctacacctgacgtgtatggtgctgatggtcctcctctgatcgcgagnaaatcagaatggcatcgatgataaccaccactgactgtgtcaagtattccatgaacactttgttcattaagatcatgagaaatgcaggaacattggtcaagccgaacgacctcaccgtgaattcatacaggacatatcgcgtagggaatgcggtcacggaatagcatcttcccgaatacgtgattgatgatatccggaacgaagatcaatcttggagaagatcagagcacctctaagctgatcgatcagatca

SEQ ID NO: 78849 - DNA, 355 bp, Oryza sativa
aggacgaaaagtgaagaaaactaacatgtggaaaagaatgctacagtccctgaggtgctgcagtggagataccgaggcacgctgcacacagttcttggatgaaagtgggatcaatgtatgcacgcgagcaagaccggacagcagcagcggcgcctatagaccaacatcggtgctagtgcatagcggctcggtaaccggccggtcacgaaagccagtctgatcacagagccggattgcttgcgtgactgagaccgaattaatccaactcttcctttaagacttaaactttgtcatcacatatacacattgcgcacacataaactgtcaactaagtgaatcaaaccttcaactataa

SEQ ID NO: 78850 - DNA, 381 bp, Oryza sativa
agcttgagctgtattgttagaggctctattgtactatattgtgtactagaatacgaagagagtagagtagaagaagtcggaagaattccggagttgtcgggaatcttctctcatttattttattctgtttattactctgatttcaatagagttatcttcctgagtaatttagatttatcttgtgagatttatctcttggttagttcctaaatagcataggggattattgttcactataatcaactaaaatatagtgattgctttagtgagttataagcactaaagtagatcttaatcgcttagacgtggtgtgtaggtaattgttatccaataattgatgtgtatcccgcagtacgtttgaggtagatgtagaggtggtga

SEQ ID NO: 78851 - DNA, 405 bp, Oryza sativa
ctcaagctttattctggacagattaaaaattctctcagtaagtgtgatttataccgaaagctaccccttttcagctgattcatgcattaaaacaacaaaagattaactttctcaaggcaataatcactacaatacatgcaactaataacaatagggtggattctggtggagaatgaaccacactttcttataaaggaattgccgtaatacaggttttgcgcttataagcttttaatctgctgctgcaagccaatataatctggctgaggttgttaatgattacaaatggcttgttacctcccttttttattaatcaacaacaaaacttttcgtattgatgcaaccgtcattgcttaattgaatcaacaatgtgaatataaatgtgttatcacattgatgtcaatt

SEQ ID NO: 78852 - DNA, 379 bp, Oryza sativa
agcttataaaaaaatataataacatttccaatactaaacaagcatactattaaaatatattcaataaaactaatttggtgggatagatgttgcaaaatttttctataaatttagtcaaactaaaaaaaagtttaactatgaaaaagtcaaaacaatttgtaatatgaaagggagggattataaagttcagaaattgatttacaactaattttttaaaaaaatgatatatatcgaaaagttttaccacaaccatatcatttggatgacgtgtgtatgagcaactaaggtgtctgcacattgtgcacaagccgaaaatgtttttttttccattaatcacaaaagatatgtatgggtactacttccgtttcatattataagt

SEQ ID NO: 78853 - DNA, 378 bp, Oryza sativa
agcttggtgctctctgccaccgtgcctccgccggtgtaccttgcccgtgacatcgctacaaggtgttccccaacccacgccacgtcacgtcagcggtggcgcaggcggagcgtgtagcgatgacaacctgtggtaatgaaggaggcggctagagagtcgatggtgaagttggtgacagcgagcagctgaaatagtggtgccatgtaagatggcagctctccgaagagcttccagatgcatggtgcgactgccgttgaccaccacgaaagtccagtggagctccttgtagcggcggtttgtggtgaggtggtcgggatgtggattgtgtcatgtggcctggtcagtggcaaagcaaggccgagcagggcggttgccgtg

SEQ ID NO: 78854 - DNA, 382 bp, Oryza sativa
agcttgcattgtatatctttccctacaaaagctaaatgtaaaatctataatccacttatgtgtcttatagtaggggaaaacagctcaagagacaaatccgcttatctgcctccttttatgtaaatcttgccattttgttaggtttgtgcttgcttatgtggttttggtcaatactcgcaataatacttctgatttgtgacctgagaacacactagttctgaaacatacactttacttttgattcaatatgttaagtcagttctggaatgaacaattccaaaattaagaatgtctacaaaaaaaaaattattcttcactgtaacacaattccatgttgcccccccaacacttgttctcagggcacgttggaatagcacgactg

SEQ ID NO: 78855 - DNA, 499 bp, Oryza sativa
  unsure (1)..(499): unsure at all n locations
ntanatatnggtagtgtacaacacgtagatagacagaaattcttggttgcttgaacaaataagtaacccaaacatgctgtgttcattgttgcacaggctgaccaaaatacatcagcttccaaaagaatagggacttactctgcatggccaaagtcacaagttacgaacaaatcttcacaaacaaatggagcaacaactttctctgaaatagctagagatatttgatcagactggatagcatcaagctgattacaagtgcccagcggatcatcagtcaaccccaaatcttcatagtgtacattcaaaggtacaagatgtaacttaacaccaagaatatgattaagtccagcaattttaaatgtgtccacctttaactctttaatgcaacagcaccacttggacctacatattgatgcaacaaagagaatataatagcaggtggaccatagatatgcacatttatatgtaaatgctgagcggcaaattatccgcacatagt

SEQ ID NO: 78856 - DNA, 388 bp, Oryza sativa
agctttcaattttatcaatctggaatatgaaagatgactccgttgttacccatctgactaattcagacagtattatcaatctttcgtatgatgatggtcaaacatttacccaaggaaaaacattaaccgtaaaaggtaattatgtcggtaataatggtcagcttaatatccgcaccgtattaggtgatgataaatcggctacggacagacttattgttgagggtaatacttcgggttcaactaccgtctatgtgaaaaatgctggaggaagcggcgcggccacgctaaacgggatcgaactcataactgtgaatggcgatgaatctccagcagatgccttcagataaggtgatgcaaggattgcagctggagctttcgaatatcaact

SEQ ID NO: 78857 - DNA, 382 bp, Oryza sativa
  unsure (1)..(382): unsure at all n locations
agcttcttcagttcttcctcattccataatatgtactcccttcattccataatataaggtatagtcaaacttggcacagtctataatttctcatatactataaggtttaaacaaaattataaccatcttaaagtaaatntaaatgtcaatctaatgatattaattttagcaaataaaatttaatttatattataataattggtggtcaaatgtttttatttatgaattttggaatatgtgcacaccttatattatgggatagatggattatattttttaaaatacttcagtaatcagtcagtgctagaatttacacaagcatgtactacctacatactctctccgtcccataaaaaattaacctaatattggatgtgacaca

SEQ ID NO: 78858 - DNA, 382 bp, Oryza sativa
tgtgactaagatatgagccagcatgtatggttcatgctctctcagaaaattcctgtgcttcaacaggctctgtcaatatcaatcatatttatattcagttggtttcgaagttatgcttcattggaaaagtagtcaccgatctgctcctattgttcgcggttgaaaggcctactcctgtttggttaggccatcatattctaaaggtacatagaaccattgcttcgagtggtacatatttatgtttatttacatctctatctattcatattctcttgtgataggtaatattactttcttgcaagctatatagagtcgatctgaacagagaaccttcgatcgaaacagtgaacttctgctatacatcacttatatcatccacatt

SEQ ID NO: 78859 - DNA, 385 bp, Oryza sativa
agcttgcgcggtacactacttgtactggactacgagcgatgcctaatccgccgctatccaccggcaggcattccagccgccggttttgtggcgtgctaagttgggctacagctgggcctctatcaagctttcaagctgacaggggttgtgccgctgggcccatgtacatgccgtgcagcggtgcagtccctggatgggggagcgccagagcggtattaaatcagatgaacaaaagctatctactgcttcttcctctgttttataatataaatcattctattatttctcacattcgtactgatgttaatgaatctagatagatatatatatgtctatattcattaacatcaatgcgaatgtggaaaatgctagaatgaactacatc

SEQ ID NO: 78860 - DNA, 439 bp, Oryza sativa
taatattagcccagcttacacaactttcgacaagagtcaacgtccgctcttcttggatctttgctactgttgatcagtacactgccttgtttggttttctgctgtgaattgggcctattctgcactgtagaacagcactgttcttcccaagcaagaaaatttcttctttcccctataataagtcaagaaaacttcgtttgccgtgtacccaaaagccgtagaagaactgtatagctattacacaatacgcaaagagttagaaaaacatgtaccatgaaataattgacatctgaaccagaagtaacatataatgcctagttgattagcaagaaagtcttcactgtacatgcccaaagaatatgcctgctggtgagcttaatgtagcttacatatgtggtatacggcattattctgttaaacgtgcatcttatcatgagat

SEQ ID NO: 78861 - DNA, 388 bp, Oryza sativa
  unsure (1)..(388): unsure at all n locations
agcttaatatgatttgangaaatgaggataagcggatcaccattttttttacccttcttatagttgtcattttctgttgcttcattttgctagcaattaccattgcctctgttcataactctttgctcaaagaaggttagatcatctctccctttcgttaccatgccatggtttttataccacttaatgacattgttgctgttatttataaccaaaatctggaaaagcaagtctgtgttgaaaaggtctgccctctaccatttttgcttgttctggtgattatgatctactggtgccaattatatgttaaaatttggcacaaatttatgtctactgggaggcctgataggatcaatgntattgcatgactcatgactgataaattaac

SEQ ID NO: 78862 - DNA, 330 bp, Oryza sativa
  unsure (1)..(330): unsure at all n locations
ctacgattacatatatatgcgtattacattattcatacctgtgtatgattntagacgtgtcatatttgttatacatgcggtaaatacaccaatgctgtctaccaaattcctctacctctagcacctgagcattattttgatagcagtatcgacacttatcccgtcctatgaatatatttctctggtgtctttccttgacgcttctccttcgtaggaaacttctatcttggatgtaaagcactgtccattaactctgtcctgctaacatagctgttcactctccgtccatttatctcaatcgtgttctcctttcatcttaggtgcagcacg

SEQ ID NO: 78863 - DNA, 389 bp, Oryza sativa
  unsure (1)..(389): unsure at all n locations
agcttgcttatatatacgacacaacaacatacacatattatcattgccgagcttgccacccaagcgccacagcagcttcgacttcattgcgatgctactccaacgccaaaatgaacaaataaaaatgatacccacgaaggacatcagcctaaactactaaagaaccaatcctactcacaactagcatcaataatccaataaagagattgcattgtgtcatcattgccaagcttcgtcgcacccctacagcgaagcagctccgactctactcaacaataaccagataagagtgatgaacacccatcgtagagcaaggaacgaaaccaaggcagtgaaggcctcgtcaaaacaccctangcttgtagagcttctgagacattgcaggaatc

SEQ ID NO: 78864 - DNA, 331 bp, Oryza sativa
gtaagtcaatctatagctccgcatcatactcacattctctttttcttatatcgcattatatgaacattcacgagagcatgatatatctgctatacaatttcagagggacagcggctgacaaagatgatcaggttatctgatcttgtggagacatgtctatcggtgatgtgacagtgagtgcatgaatctaattctcgcttggttattctttctgcagcgcgctgggcgcagtcaatcagtccatgaaagcgagccctcacaccaccgacgggaacacgcctgcgccgtcttgctggcctgctttgggcgagagcaccttctcttcagatgc

SEQ ID NO: 78865 - DNA, 388 bp, Oryza sativa
agctttttatattttccagtgggaggtccttcccaacagaatgatctaaaactgccctgtgaataatgcaatcaagatgtgagttagtatgtcagattatccatcattctacaaaattcataacatacattagaaaaatgaaaaacagaatcatacagtggcctaagaatctcaacataattcttaaaatagtggcaaaaaaaaaattggtctcaacctagcaaacctgatttcaaataagttgtggcatcagacttcaggcataggcctagcgttgaaaaagaagttgacaatttaatcaagctgatctgaagtaagcatatctcaggttgatagatacaatgaattaggtactggttaaatagcactaaggacgttatcaaaaaaa

SEQ ID NO: 78866 - DNA, 431 bp, Oryza sativa
  unsure (1)..(431): unsure at all n locations
cgagatatgctnaggtctcaactaaaatatctcgaggtaccggtaccatatcatttctgatcgttagaattaacaatgcccattgtatccagctagatccaacgatcggaaacaatttagtatcgtgaggtaccggtacctcgatgtactttttgctggactagaacatatctctagaagtttaagagcttgttttctcttctcttgtgctgctagatatttgtcggaggtctagtgtctagattttatgttttatgttctgatgtttggaatctgtatagctagcttatatgctcagactatatacatttgtgggtgccgatattctacgggatgaataggccaggttttttcatatccattattaataaaatatcagctgatcagacgtctgaatgtgtctgatccaatgccaaacctgtcagattgtc

SEQ ID NO: 78867 - DNA, 385 bp, Oryza sativa
atgctgatccttcttatccactgtattaagggacgtgactagagctccgatgtccaatcggatttctgacgttggacacaacgccagtccatagatcagcgtaaggcggtccatctcgttctttgaatgtcccttgttaaaaaaaatagaaatatattctttgatattaatatagtgacaaagattgctatgtgacactagcattagctgaaagataatgaaaaatgtggctttggtacatatgagtgacgctcttattatgtccatgtacattataaattagacactccaggcagtaggcaccagaatatgatagactacaacaaggtgacgaaaaacacagcatgagatggtccttttagctccctctacctctgtcttccat

SEQ ID NO: 78868 - DNA, 386 bp, Oryza sativa
  unsure (1)..(386): unsure at all n locations
agcttatacatatatgtatacactttgnatttatacgtataggtataaaactttatatttgtatctatatgtatatatttataggtataaactctttataaataaaaattgtatatatgtacacattctatattatatatatatatataaactttgtacgtacagaattttataaattttatacatgtacatataaagttcatgcacacgtatgaactttggctgacctcccggtagtatttgatctaaacatgaaaaaaaaatcccaagacctaacagaaaaatgaaaagtgaactttttttccaatagaaagataagttaaacccgtgaagattcaactggtcaaagagaaaagcagcgacgcaatcacgcttcgtgcaccccg

SEQ ID NO: 78869 - DNA, 380 bp, Oryza sativa
  unsure (1)..(380): unsure at all n locations
atcttattctttttgtcatgcctccaccagaatatgaaatcaacaatgttgaacctattttgcctgcaccagccaatgagcctgacaagattcttgtgcttcaccccaccaattgagctgagctcggcgatgaagtccttccttccatttattaaggttttaaccgccacctcatagcctcctaaggacccgcggcagaccacgccaaaggcaccacgcccaatcacattcaaaaacttgttagtcgcaacattcaaatctcggtatatgaactgcctangtcccccaatttccttaagatctaagtcgtcattgctccttcttgtccacataaaacatgagacaataatctacacaacaaccaccactagagctaggac

SEQ ID NO: 78870 - DNA, 222 bp, Oryza sativa
  unsure (1)..(222): unsure at all n locations
gcctatanaatattcgagctcttcgacaggctcagttctagctcgactacagagcttatatgttaagtaaaacaatatatattttaaggataatattctaaaaataattaacttctagttcttcatattaatagaagaggagaaaagaattaaatatacatatgatgtcaatacaagatatattaataatataacaacaaaaatcatatattactaggctcg

SEQ ID NO: 78871 - DNA, 379 bp, Oryza sativa
agcttctttttttctagtacctcaccacattatccatttatccttgcaatgaattcgctttgcttgtaccaatcctagctactactactactaccatcttacattatccttgcaatcaatattttgcttttgcctgtaccaacccctggtggagtgtctgctggactggaaattgatgtacaagtactgtgtgcatatgcgcttaaatgtacgacgcatatatcaatacatcatcatcacggcggtgaatggtattgatatatacccgtgttgtggttgatggaactcaagtcaccagtgagtgagccaagcatatccatctaatgttatctgtgtatctgccaaaatccaaaatgctacctattaattgcttcttgct

SEQ ID NO: 78872 - DNA, 391 bp, Oryza sativa
agcttgacattttatagatgtcacatcattatccactaacaagatgccacatcatcatccactaacaatcatcacatttaaacattatgcaaacatgctatatctttataggttttgtaatttaagagcttttcaaatacaaacatgttaaattatcatccaacataattcacacaatgtttcaatgtatatctttattatgttttatgatatcctatatacttatatagttcatcctcaattagttagtgcttaaatgattgatgatgtgaccatggctactatggatacgaccattgctcacatcatgaatcaacaagaagacatcaagatcaagtcctccatgtgctgcaatctgattcggccacgtgttacattgctgacttcaaac

SEQ ID NO: 78873 - DNA, 508 bp, Oryza sativa
  unsure (1)..(508): unsure at all n locations
gctngatggagcacagaccgattaatacttatcggtcactgtgaactatttcgntacacctatgctaagaccggaattgttagtaattctcttcctattaatcctattgatgtcgataaaaagaaagggagaaatgttattggtaatgatcctcggcccaagacacttatgatcaataatgcgaaggccgaagatcataaagttgcaaatgatgagtcatctattatccaaaagaccaaaaagccgaagctcacttttgatatgcttatggctaaatacaagaaaggattagccggtcaatgattcgacaaccaaactagtgattctaatagaccacgatcatctcgtatgaagagatttggtcaaacattcaatgcatcggagccatcaaccataccagctccatatagacctncaattgtgatgccattgtatccatatccaatgtcactatatggttatccctttatgtattacatgccatggatgcctcaatctctacgccgtt

SEQ ID NO: 78874 - DNA, 389 bp, Oryza sativa
agctttaactcttctgttaagatcaaacctggtgcagcacaactcaaaagcaaaatctcgtcgaaataatgaaaatagaaaagggtggcgatgcgccgaagtattattgaactgtcgtcccttgattacaaggtgttcggtcatatttatacccgaagtacataatatgtcctttctggacatgagtcttatctctaacacaacttaaaatacaaataagttctctaacacaacttaaaatacaaataagttctttggtggactcttaccaaacatatccctaaggaaactgaaaatgtcctaattaacatatacaattgccctttttaggactccaatccttgtgcggcaatggctgtgtagtgctttgacaaatcttgacgacagtc

SEQ ID NO: 78875 - DNA, 495 bp, Oryza sativa
  unsure (1)..(495): unsure at all n locations
ttgaggagaatggtgacccttggctacaaccacctgccatctcatctgacatcatgctntctgtacctaagtatcttccctgaggatgttgagatcaataggagtcgcttggtatacagatggattgcagagggtgtcgttagagccatagctgtgatgacgaccaacgatgttggngatagtttctttaatgagctaatcaaccgcagtatgatttatagatcaagagtgtgcattgaacgaaaaattaatattcgccgagtccatgatatcatgcgtgatatcacagtttcaatctctatagaggagaactttgtattcttaccagtgcatgatggctccaatctagcacaggataacactcgccacatatcatcgcatgggagcatgtcctgcaacacatgattggattgagcattattcatccttagctattttgggacgacccaatatgtagccacactattgttcaataaattctgatgtacggtgttg

SEQ ID NO: 78876 - DNA, 385 bp, Oryza sativa
agcttgcctgttctttctttttgctgcttactagtgtcatattctttgagccatctttgttatcactactgtctaggacacaagtagaccagcaactaagggcaagtgatttgggattttaattcaacattactatctgtcattggattgtgtaccactcatatatatatatttggccttcctagctccacatattacttctggatagcacaagttcttgatccttgcaatcgctgactaccccttctaagtatcctttgctttgctggtaagaaccttataagagcttagttaggaactccatattgctgagaatcgtcgagaggcaccactacacctgcgtatgagattattagggataaccttcaccgctttgtttctgttt

SEQ ID NO: 78877 - DNA, 386 bp, Oryza sativa
agcttgacatatttagtgatcacaagtacgatgaatcacaagacaacctccataggtgcaatgaccacatctcaacacggtgactaggagctgcatgaaaatcatatggtaggggaaaaggaacaatgaatttagctgtcttatgttttcaccatcagggcccaaagcattcaacaaaaaaaaaagaaaaaaacaccttgcttttaatttaataaacatgttttctaaacaaactaggtctaactcctttttagatgatgatgaagattatagataattgcttatacagattaattaaatactatatagtatatagcatagagaaattatcaacgtgatgtcaacgaaaaatatttgctgaggaaatgtacttccaaaacatggca

SEQ ID NO: 78878 - DNA, 391 bp, Oryza sativa
  unsure (1)..(391): unsure at all n locations
ttagataaaataaaattcacgacaatctggatatccacatatatgaccagtgccacatgtaatttgcgcgggcggtgggaccagtgccacatatgcacgtggggaccaactgggattaataaatgagtgccacatatgcgcggtgggatcaacaagtattaataaatgagatttcgatatgcacgtatgtgcngggggaccaatacgtattaataaatgaaaggtgtgcattatttgtgaccaaattttctattgtgtcttgacgccacatttatattcgctacagagtatgtgtacctattctcagcatgactgattcatgacgaaatatgaaatttcctatatatatgctgtattaatgacagaatatacaacgcacgagaataacatt

SEQ ID NO: 78879 - DNA, 375 bp, Oryza sativa
agcttgccacgccctaaggtgccaccaaaggagttgtttcttgaccagcttactgccggtcacgagagcccatcaagttgccgctcatcatgtccaaccctgtattttcctttccagcaaccattaggctacagtaatgaatgtggcactggggatggtgcgagtatgaattcactctggttcaaccagaatgatttcaactgcagcacaatctccaccgtgatgccaccagtttcaccatcagccctctcaacatcaatggggctgaatcttcccccagaaaatactcgtcacggaggcactggcattggcaacaccccgttctactgggatggttccaatcctagcagcagcggcagtactgggagcagcgga

SEQ ID NO: 78880 - DNA, 389 bp, Oryza sativa
agcttgatggtcttcacatcataacggaagtgcaagaagatggacgtcctagtgccccggccgaagccgccaagaactatgtacgtcacagcggttgggttgtgcgggataacgtgcctgtcagtacggtgtactggcgaagaacaagggcacgcggagatcatgagagctttgtcccagattcggagaaagagatgctgtggaccacaatgcacgagacattcacccttcctgcgggtacagaggacaaagtgaaaaggtggactctgaagaaaatggcagaacagtttcagagcttcaagggagatctgtaccagaagtatatactgaaggggcagacaccgaacttcgacacattcccaaagctaagggatcactgggacgagttc

SEQ ID NO: 78881 - DNA, 433 bp, Oryza sativa
  unsure (1)..(433): unsure at all n locations
gcttnctttgctntcttcactcagatctagagcctatctagtgagactgttagattagatgagagtgtacgagtggtttggagatggcttgaagactaagtatgattgagcactttggataccttgtgggctgtcactcgggcttattactcttggagatcttctcctagatgggtatgtgtctcccgtgagcttccaaagatcttgtggatgtctgaagatagtttgtgaagttattcctcacctgcgcaaagaaacgaggtaagtgagttaagattcttgtgctgagttttcagaggttgtcctaagtagagcaacttgcacttgtggtcttttctataagaaagtttgagttggatctttggtgtcgtctcatttctagataataacctagaagtgttgaattgaaagctgtggacctcctttgtgatct

SEQ ID NO: 78882 - DNA, 388 bp, Oryza sativa
  unsure (1)..(388): unsure at all n locations
agcttttgtattttatcaatgcataaataactgcctaccgaatgaaatgaggtcatcaaacagaaccggtataaaacatggatttatgattaagggtaaatgggagagcacaagagtcagtcagacacaagttaaaaagtttccatttggtatagagaggtgatgataaaaaaggagcaacctaagtaatataagaaaccaaattcaataagtttgctatatttcatagacatataggtctttactcanattctattttgtcatgttatgtacaatgaatgtaatgccatttgttcactagtacttgttgtgaagcagctatggttggcagctagtttccttctatgtttattaatttctgttttttatacagtcgtacattaggctt

SEQ ID NO: 78883 - DNA, 417 bp, Oryza sativa
tgatccagtgtcacaagagcacacaccagactctctcatgaatttcacgatttagccgcgtatccatgctcacatcgacttcatttatactcaaacctcctaccgagtaatcaggcttaaatatgcagatcccacaatacagatatacatatccaccaaagatcaaatgctgggactataccccctccgcccaacatctactaattcccgacgaacaacgtaaaatctctctccctccgagcgagcatgcaacctccgagatccccaaatattcgcgggaaccaactaatctcgttactactactaggggtaatgcaagaggcaaagagatatagcagctctcagatctaggagagaagctaaggctaacgcagattcgagaagaagtgtgtgtggagagagatgagaaagaggatg

SEQ ID NO: 78884 - DNA, 379 bp, Oryza sativa
agcttgtttatctttatcattgacctgttgagcaatatcatcatgcacgatcatgggcatcacctggaaaatctgtggaatctacaacacacacagatatcattgacccgttgtgcaatttcattatgcatgatcatgatcatcggctaagtaccttctcctgtcatggaggcggctacagtgcgcatggcggcgatctggcgaaggaagacaaagccgggacaagattcactcttgctggagccgagtttgcatacagcaatcctgccgcctcgaaacgaagccggctgatcgctccagcgggagccgacgcgagcgagccgagtcagccctcctccggagcagatggagctgtgcaagcgcaccctcagatcactct

SEQ ID NO: 78885 - DNA, 386 bp, Oryza sativa
agcttacattatatttgaagagcacattactattcattgaggcttccatttatatcattatatgtggtatgcttcacaacatttctcatatttcttgttctcctacacttcaaatgcactgtctttggatagataaaatttgagaggatgtggaaattttcagcgcagaagatcatattttgttgaacattgcattgcttttttccagaccagcattgcattgctaattgatttatttaaattcagacgtgcatgattattgaatccatgagatgcagaagttgtagattgtctataccacaagattacttatttaagctggagttgatcagatactaatgttaattctgaacacattacgttcaggcgaggttcttttgaagata

SEQ ID NO: 78886 - DNA, 184 bp, Oryza sativa
ctgtagcgagagtgaagcctctgccggcgatggtgcatgtgtgcggactgatgacgaggatgttgcctctggaggcgctggcgctggtgcaggcggtgctgtggctgctggggacgcggctggggacacttgcgctgtgcggggggcggtgcgtgtcttggaggaggtggccgttcgtgcttac

SEQ ID NO: 78887 - DNA, 411 bp, Oryza sativa
  unsure (1)..(411): unsure at all n locations
tgatatacggatgacccctcaggctaaacatgttatatttataaataacgttntgtcgatcaaaccactcttgacgaagttcanatttggcgatccangccagcggcaacacaacccatctggtacagtctgacccagcccatcttgatgtttaacaggcactcangccttggttactcaagctgggactgatcattgttcctgcgtgcctgcactatgccaacgctaaccatgagaagtcggtacagaagctgggagctaggaggaagtgactcatatatactctctccattcaacaaaataaataaattctaggcctgggttagttttcaactntttctttagacttctaactnttatatcacattaaaactttcctacacacataaactttcaatatttccgtcacat

SEQ ID NO: 78888 - DNA, 442 bp, Oryza sativa
  unsure (1)..(442): unsure at all n locations
agcttcaggagcaatgtataacagaacaagctaggaaagaattgggtgagaattcttatctatattatgtccacctcttcccttcttttggtgttccttggtggttgtagttacttatgtatttatatcgcatgcgacctatgagcgttcattaaatctggttcagtatacctatagaaacagacactgtaacaaaggaaaatagcttaacatgctagcatgatgtacaaaatttagtatcagtaacaatggataaatcagggccctttaacccagttgatatctctaatcagatataaacatcagtgggtttagatttgacatcttactggacattggatagtactgattcagtaccgatactagcattatacntaaaaanacaagtatatgtggacanatnctacaattcttgatatttntcagccgacttactgattta

SEQ ID NO: 78889 - DNA, 411 bp, Oryza sativa
taatacacaagtattatatattccatatttgagacagagactggtttatattattaagggttcgtccttatataagatctttagtttgaccaagttcgtagaaaaaatatctacgacaccaaattacgtttactacatattacattgaatataaacatatttctacttttgataaaatttggctctattttcttaaatttggtcaatcttttctgaaaaatacatataataaagtgaaaacgtcgtgttatacgaagatatctactacaccgatcaagtgcagtactaatgatttcaataaaacaaatgacagggattttcacatattggtatagatggagaccaaatatatactacgtcctcaaatgtttgacgccgttgacttttcaaacatgtttgaccatcggctta

SEQ ID NO: 78890 - DNA, 326 bp, Oryza sativa
  unsure (1)..(326): unsure at all n locations
ttgagtggaaattagtttctggtctcatcaatttaacctatatgatattctgagcagcagttatggtaacatattagtccggcctcacccatgggtgatgtgttatgggatctggtgatcccttctctggaaatatttatttcttcttactgaaatgaagcgcagntctcctgcgtttttgaaaaaaatagtaacatactactccctccgtcccaaaataagtgtagttttgcactattcacgttcaacgtttgaccgttcgtcttatttganattctttatgactagtattcttattactattagatgataaaacattgatagta

SEQ ID NO: 78891 - DNA, 504 bp, Oryza sativa
  unsure (1)..(504): unsure at all n locations
acctataaaactcagctgnacttctcttatgtacaagctgccgattggctaggattgtggcttctatatccttaagctcccgacgttcggctagtcttagcttggccttctccagcttgaattgatgttgctcaagatagaccgctagagtaaggatgtcggctagctcatctgggattagagcttggttctcatgttgtccagtttaccaccaagttgtccagtgatgacgcttccagccgatgagagatatcttcaagggttttcttcacatcatcggacaagggaaccagagatttgctggtggtatcttcttctgtttctccatcaagataatctntaatgtcgaaagaaaacagatcggctaaggcctgcaagaaagaatttaaaaattaagtctcgatatgagttatgtggccgattcaagattcttataagacaagacttaccggaatggaggagcagctggttgatctcttcctcatgtgggactccccacagcat

SEQ ID NO: 78892 - DNA, 384 bp, Oryza sativa
  unsure (1)..(384): unsure at all n locations
agcttaggaagcatgttacctacaattcanaatattaaatganattacattgagcaagggatcttacagggtgaaagttcaatgcgttaacagcgtatatgtcattgccatcacggtgacatntaaatgtaaagtttttcccttgttgaccatcatcaacatgatgaacaccaactcgtccttctatcgatccaaccttcanataaaacataggttaattaagcatttaagcgctcaaatgatcagaaacagttgaccttttataaggtacaccanacacaattatgcagtaaagtcanacataataggcaaacataagacataatataagcagctgacgatggatataanatgaccaagattgagaatacataatatatggac

SEQ ID NO: 78893 - DNA, 387 bp, Oryza sativa
  unsure (1)..(387): unsure at all n locations
ctcagcttatacccatgaagggaggtggagctggangggagtgacngttattatccctgcatcgctggtggaagggggagggaagcgccgagcccaacccattgcgtggaggggagtggcggtcacagaccccacgccgccggtgaaagatggaggggagcgctaagcctaatccccgcactggaggggagcggcgtctagaaccgtcatcttccttgccggtggagccccacgtgccgcggcccatgaatctacagttatattgggatggagacccgccacctcttcttcttccccattgtcttccttgctgataatgcccccataagctgtggccgacgacactatggtggagccatggaggcaagggtggggacggagacccgc

SEQ ID NO: 78894 - DNA, 377 bp, Oryza sativa
  unsure (1)..(377): unsure at all n locations
gtgatatacatgcagttgggggctgtgggcagatggcccatctgtgccaaagaaaagatcagcaacgacgctgggtgcagaggaaacgtgtaacgcgggcccaacttcgagccagcgcgtgcgtgcgtgcgtgaacggatgattnttntttcgcgcgaggacaacagataataaatcagagacggacaattacttttaatctcgggcaaagtttttttacggacgaaaccaaatacggaagcctctacctatttttattaggtatatatactatgcaaaatccccgtgcgttgaacgggtaaaataatctaataatatatacgttttcatgcttatcatgtcacagaaatggttgattttatgaccgacttattttt

SEQ ID NO: 78895 - DNA, 485 bp, Oryza sativa
  unsure (1)..(485): unsure at all n locations
tgtnagtgcctaacactaccaataaatatgggattctttatatatagaatgtagaagggaaaagtcgaataattgttttatatggtgcagacgaatcggtgatattgaaaacggaagctcttcttcactggcattcatcggtaacatgacatcgttgagcatcctgtatgcataacttttaatccacttaattactcatacggccgtactactgctcagaatattaatgtaattcaaaccaagttgaatgatcttataatgcataacatatttctttgcaggaatttgaggaactgtaagatatctgataatcttgcatcaatagacttttcgaagttggcaagtntaaacttactggaaggattttatttctacaataaattgtaatcaggcgccttttgtgaatatatttctatgaaccgtacaatgtctgatgacctctttgccacccctttttttacttttacagggatttgagtttaaca

SEQ ID NO: 78896 - DNA, 440 bp, Oryza sativa
  unsure (1)..(440): unsure at all n locations
agcttatattttatccttaagcatcaagggcaaaaaggacatttgctaccaaacgtaacactgaaatgatggaaaatgtaacggtaggggcatggaagggatcaatttgaaatttcacggtatgggcatggaagggatcaaattgaaatttcaagggtatagaaaggaatcgggtaaatttaagggtacgggcatgggagggatcaaattgaaatttcatgggtatagaagggatcgggtaaattttangggtatgaaagggattgagtgagtcttcatgggtacacagggcaattacttctttagatgagaatgatactcccttcgttntttaatagatgacgccgttaattntctttctcacatgtttgaccattcgtcttatttcacaaatttatgcagatgtataagatataaatcacacttctgtcggcgatatg

SEQ ID NO: 78897 - DNA, 468 bp, Oryza sativa
  unsure (1)..(468): unsure at all n locations
taacctttttccgaaagaccatntcccagagcttaacttggtttaattngcgaaaggactcgcacgcatcggcacacttgggacggtgtacggcacagctggaagccacgctgcgaaagtggagtgaggtgagtgaatgcgttagctggtatgggacggggacgtggctgggttgggtcatgtgggtggaggatgaatcgaagtcggatgtcatcttggcgtggccgtgcaaggtcgagatatcgcgcgcttgttgctccacggttgttgacatgtggcgcggcgccgatcgaattgccggctcgcgcacgagctttgtgcctctgctttttccaccttttgccgcgcacgtcatagcgtgtggctgtgttgtctcgttcgacgtcatggcggctgctgctgctcatctcttgcgcccggtgcacgcatcgaatcattgcgctagttggttaagctacctgggcagac

SEQ ID NO: 78898 - DNA, 396 bp, Oryza sativa
  unsure (1)..(396): unsure at all n locations
agctttccttttatgtggaaaacagatttaccacttgtgatttcagatcatcaagttcaaactagcagctcgctctttatcagcttctaaatttagcaggggtcaaagtagcaaagaattttttccatnatgcacaaaagtgtattattactcctaccatggtgtgtagcatcattatcatgttcccaaagacggcccagtaaaagtgaacaagcttgcatagaaaccacatcgcaatcaacagaatctgcatatgagccaatggaaaacgaaaccctacaaacctgtgttacctttgctcttccggaatcgtttaaccactgaatatggtaagggtgtggatgcgtacgtgtagtcatgccacgcttcttgaccaaatcagaaactcaccaagtg

SEQ ID NO: 78899 - DNA, 358 bp, Oryza sativa
  unsure (1)..(358): unsure at all n locations
agcttgatggtctgcacatcataacggaagtggaagaagatggacgtcctattgccccggctgaagccaccaagaactatgtacgtcacagcggttgggttgtgcgggataacgtgcctgtcagtaccgtgtactggcgaagaacaagggcacgtggagatcatgagagctttgtcccagattcngagaaagagatgctgtggaccacaatgctcgagacattcacccttcctgcgggtacagaggacaaagtgaaaaggtggactctgaagaaatggcagaacagtttcagagcttcaagggagatctgtaccataagtatatacttgaagggccagacacccgacttcgacacatt

SEQ ID NO: 78900 - DNA, 483 bp, Oryza sativa
  unsure (1)..(483): unsure at all n locations
gggggggtttgntgatggtcgttagcgatcaatttctttcgtctatattaccaaaatagaggagaactagttatgcttgcaatacatatacatgttagaataataatattccactagtctttggtttactaaccttttgtagagaataagtataaagtgaaggagaatcgacatcaaatcaaacgataaatcaatcggacgatgtcgagaatcaaacttatgtatgaatgggccaagaactcagaaatgacacaaccaattgggccaaaattcacaagtctgcggagaagagaagtctatgaggccactagccaaattgtgggctggttgggccggcccctggttcggccgaaccctcctcttcaccattggatgtggggtttggcagggatgctccagatcttctcctgatggcagttgcggtgtacttcagaacattcgcagtagatactaaccgcatacctgcctataaaaggagctcac

SEQ ID NO: 78901 - DNA, 394 bp, Oryza sativa
  unsure (1)..(394): unsure at all n locations
gcttgttgttttttattggtataaatggcatctatgcccatcatatttgttggtatagaaaccaagtgtggtaaggaagttagttgcggttctgtccagacacctgtgttacggctgcgttgtagcccgcagccacccagaatagtgccatgtgtacaatatagctagaggctgcaacagcttgagccgtatgatcgaatgcctgacagacacaacatttgtagccttgtgaataaaataaactacctcaagacaatatgtgttaaaatctgaagagaaaaaataacttaatcagagctacctctacattgatcgagctatgcatgattctattatgatacgtcattcgtatatgagtngagttttacgtctgtcgcttttggaaatacatatt

SEQ ID NO: 78902 - DNA, 448 bp, Oryza sativa
  unsure (1)..(448): unsure at all n locations
tgacttcattcttgccaacatgacgatgcagttggcttggcgatcactaacccatggtgtcattcattagcctcatcgtagtgggacctattccttttcacacctcaaaggagaacattagtctcaacaaatcagttgtcatccttcacttgatgaccaaccggttgcatatgaaagatatggatatgtttgttgagtattcgttaacatcacaagtgtcacatactcgtatgcaagctcaggtgtaaagatccgatataaataataggtgaacaacatggatctagaacatgcacaataaatgtataggatttgctcccnctaaatatatgcatacaaataaatatacaagagatgcaagtgtatgcataattagagaatgaccaatggcggtttatctatacatatagagacggcatatgtgtaatgatggagaccaccataaaca

SEQ ID NO: 78903 - DNA, 391 bp, Oryza sativa
  unsure (1)..(391): unsure at all n locations
agcttanttttccacactcggttatagggtggtaattaacctcctagttgctgataattttctttttcaaaaattcagtttgcaatttcgtcctgtaaatttccggtaaccagcactccagcagtaattaattagccagttaccggtctgtgttttcttttttgttaattaaagactgtcatggtcgggattacgtacaagcgatgaagccagagaatagtgacaatgatcgattccatttgttntgattcagtttgtcacttgtcagcttgttatccttgagaagaccagtagcatggccgttccgtcaaattcggaggttctgtngcaaagtgaanggatacaacttaattgatgatataatatgaaaataatntatactctgtaatat

SEQ ID NO: 78904 - DNA, 445 bp, Oryza sativa
  unsure (1)..(445): unsure at all n locations
nntgcataatattccataggcaaacctttcttcttcctatcttcatctttggcacgctcaatcctgtcagcttcagcattctcttttctatacttgtgaccccagggcaatgattggagatngacagacatcaattctttgatatcttctaactcaaattctaaacattcattggttaagaaaagatccctttcatttgcagcattgccaagaacagtctctgaaccctttctgaagtagccttccatgaaccatttttgctccattaagtttctgaaacatgtactcaacaaagcacatgaccagttctcctgaatcatcttctagtgcaactgtccgtcccaaatttattctgagctctcgaacataagcacacntgtatagagcttctccagaaagtgtntaccaatggctttcaccttccatctaaatttctttgcatgtt

SEQ ID NO: 78905 - DNA, 383 bp, Oryza sativa
actcgacccgggatccctaagtcacctgccgcatgaagctctcatcatattttatttcaaatgattcactatactatggattgatcctaatcctctacacagaactctgtaataccgccttttagatgatgctggtaccataatcttcttaccattgctgactgaccacctgacaacaaagactagaaccctactcttactgatagagtcattacagcgcataatatgacacctagttcactcacaaatatttgtggcatattgatgtgctgatatggtatttccgatataacttggatggtagcggagcacgctgcacttcagaggaagtgacaatattcaaataggaatctgcagcagctacatcttgcagtacctatgaa

SEQ ID NO: 78906 - DNA, 365 bp, Oryza sativa
aacacaggaataccatatgctttcgagaggggtcccagaccaacaacaggggatgtcccagaccatactgtgccaggaagcccaggggtcctccccgacaccaccccggcgaatacacatgtctctcggcagcaacgctcccctgataagctagttactcagcccagggtgtcccattccacccatgtggtcgtacttgtcttatgtttggatgaagatccaaggaaacaggccttaagtgcaagagcggagaactgtacattcggtacgtctcccggtccgcggttctggaaatccatttagttcgcaagcaccgacccaggtgccgggtacccaagacgtttgaaaaccccagctcacccaag

SEQ ID NO: 78907 - DNA, 500 bp, Oryza sativa
  unsure (1)..(500): unsure at all n locations
acctatgatactaagctatccgacttactttcgcggtgctatctttctantaatcttattattatatgtgcaccattcgtaagtcataattgaaatcctaaaatcacgttattgtgcttcctctcaattgtaatattaagaatcaacgtgctcgttaaagatgcaatggaaataggttaaaatttcatgttcaaaattttcaaaccatacacgatgactttaaaacgatggcaattcatttcgacggctangggtgcctcgtgatttggttggtgttgaatcccgagactaaattctatccccggtcgcatcggatgtttggacactaattagaagcattaaacatcgattaatgacaaaacccatttcataacctgtactaattcacgagacgaatctattgagcctaattaatccatgattagcatatgttgggctaaagaaacatgtgctaaaaaactaattgacagttgcatgtaatgcgaacggactttaaccta

SEQ ID NO: 78908 - DNA, 372 bp, Oryza sativa
  unsure (1)..(372): unsure at all n locations
agnctgacatatatattttcatattttcataagaattntaaataaaacgaatggtcaaacgttgttcaaaaagtcaacggcgtcatacattaaaatatagagggagtaccatattccatgttgttagttatttataaactcttgtgaactatntagatggcatgaataaaacgaggatatacggccttaaggtgtgaccaaaacgatctgacggatggngctactgcatcgccatggagacgatggcgttcactccttctgtgagtatcggtgtcgggtccccgatgagcagcctgaagacgatgcgcaccatgatcacaaagcgtttgcatacgcgcctctctagcctaacgttncggccagcacgctctt

SEQ ID NO: 78909 - DNA, 505 bp, Oryza sativa
  unsure (1)..(505): unsure at all n locations
tataaaactcaagctgatgtttggcttcagngatatgcccaactgngaggagtggaccttttatgaaacagcttcagtgtctgtagaagcttctacacctctaacattgaagtttctaccttgtctggagaagttgtacatatatggctgccccaagctaaaggctctcccactagaaattggacaagggaccactagactaagggagctccacataagaggagcaaactgcctgaaggtggtggacgacattccattcctttctgactgtctttcaatacgtcaatgtgaaggccttgagagggtctcgaaccttccacaactgaggaagttgtacctatgtggttgcccaaatntgaggaatgttgaagacttgaatagtttggaatagctgctgcagactacggatatgcatgagatgtcttcacagngggtgcctcagctttgtgaccagcatncgcatcttcaccatgaagacctgtatgtctacacgtggcgttgggat

SEQ ID NO: 78910 - DNA, 426 bp, Oryza sativa
agctcgtacgcgcgatcctctaagccgacctgttgcatgctagcttcttgttttttttatctgcgacctttgtcaccgccagagatgttttttttcaccgaccaatctgtaatagccttactcaagttaactgctagacatctctaggatgctaccgaattaacgctttcagaagtgggtagtcacaattaatatttgcttcagacagaagctccggatctcagattcgatgagctgaatgctatggcgcacttagcctatttccaatcttctttaaggtttgtcggaatcggaccgtttgacacacttcagcttaccgatatttcccgactgttaccagttccggagtgtatagtcttacagacataatagctttctttgtatcttgcatgtggacttaaattaactgccagccattaaataaaa

SEQ ID NO: 78911 - DNA, 268 bp, Oryza sativa
ctcagcttcacaaatcctatataaaaaatgttcaatcatgaagtaagatctcattcctggattgaaataaagcaaatcctaaatccaaaatcaactatgaattaaatcctactttcctaattccttcctaaatcctaaacataaaccatctacgggtatggcaaggcagggaatgaggggaagagttaccttcgtcccttgggcttcgtctggagctccagacagcgccgctagctggtgctggcgcatacactggaggcgccgagac

SEQ ID NO: 78912 - DNA, 375 bp, Oryza sativa
  unsure (1)..(375): unsure at all n locations
agcttgtagaaatttcatcaaatgaatgtaaatntccggatgcgatgtttaacatannattaatatatttgtaagcctcaagccccctaccctgttggatcctcatgcaaagaagaaaaagaagaaaaagatgccctccaccatttctggatttgcttcacatgatattnttttatacgtcgtactaatttatactattcttaaaaataatgtttaaattataccaatatattataaattaaacgacaacttaattacaaaaagtattatcaagcatacatactgtatctctgtgcctctgcaatctcgcaaagacgtggtatggaactagaagganactgcaacatcgcatggtttgaaatggttcttcacctt

SEQ ID NO: 78913 - DNA, 433 bp, Oryza sativa
  unsure (1)..(433): unsure at all n locations
ntatgtcctcttgtcaggctcctaattcanataaaatagctcttgacggtagcattgtcggctcgagaatcaaagtacggtggcctgctgatgaaatgtaagtgtgataatcatcaaatatgtttcttatttgaagagatgttctaaaacatgcatctatattataattagtgctcaatggtttgttgtttattcattggacttgtttatataaaacttttggcgacttaaacctggtgtatggagctatgtaccaatgttttaccatttgctatattgttcaattgttaatgctggttcttattgaacttccattgctttagtcctctggttttataacgaactctcatgagttatactggagttatgtgtgtatgttttaagcttctcttattaatnnttgaatcattgcatgctctgcaagttctacaat

SEQ ID NO: 78914 - DNA, 470 bp, Oryza sativa
  unsure (1)..(470): unsure at all n locations
agcttatgccatctatgtatcttacatattatatttacttgtaactatcataccaaactcttgcaacaatgcgtcacctagtaagcataataaggatgtaatagcgagggtagtcatgtaatctgtaaacaaatgacatttaggacatccgcaatgtaagcattaaatagacttcaactgcccaccaagaaacatcgtgaaagtgataaacaacaactaggtcatagtggtactaccagcaacaaggaatatatgagcataaggccacatgaagctgggagtagatgattntcttttaagtgatcctaccttatttcctgnggacaattgcaaatttctcactgacttgaattgttattgcaagaccgccacttacataattgcaaaataccactagaactatcattcgaatggcatcctaacgaaaagtgaaaaaccagtgggcaagttcctactaccagcacatatac

SEQ ID NO: 78915 - DNA, 383 bp, Oryza sativa
  unsure (1)..(383): unsure at all n locations
ngtcaacttgatgctacggcttntgctggttggctntcacctatgttgtcccttcgaccttcgccacttgcctccagcctacgcctttgcctatgtccttggtttcggtaagcccggccaaaggtccttgtggtatacctccaacaagcccctcaagggcaagggtgagtatggagcttcgaccaagaccttgcaaatcgtgtggtataccatgaacgcgctccgttcggccgatgttcttgctgatacctatanntttttacctgcgagaaagtctagcattttgcattagcagatctagcgatcactgttctttcctttcctcgcctattatgggcgaaatggttgaatanattangaattccgtgaacagtaatgggcat

SEQ ID NO: 78916 - DNA, 334 bp, Oryza sativa
  unsure (1)..(334): unsure at all n locations
agcttccatactattgntgtaaaccggtagttnttacagctccaattctaaactttcagatacaaaataaaaaatcattgtacacctcanagtttttgttttcctgttaatctaagcattaaaatgcagagtccattttcgttttgaaagaagaaaagtctacatttagataaacgaccgttntacttatgtttatagatcaagatactagtatacaactagctagcaaatacttacantttgcccagaagtaatagataaagatcagatctccatatgttagcttgcatatgtaggcgaataactattgctctggtaaaaagcttacctgtga

SEQ ID NO: 78917 - DNA, 460 bp, Oryza sativa
ctgatgattgaccaagatcagcgggcattgaacctaacatgttgtttctgctcaagttcaatgtatgaagctttcgacaactacctaagctggctgggatatcaccatcgaggctgttggctgacagatcaaggacacgaaggagggtcatgttgccgagctgatgggagatggtgccgactaggccagcaccactcagacggagagtggttacacgacctgtatgccggcaattggtgcaggaaacaccggtccatcgacagaagacatgtgctggcattgtggtatcattgccaatggagtcccaagaggacagcacctgtcttggatcgttccttatgaaggatttgaatgacaggagtgctgagaggtcatctccatcgatggtctgagaggtggctgtgagcaagagcacggcatgtttgataaagagaagcatcaagctgcacttgatcccatg

SEQ ID NO: 78918 - DNA, 321 bp, Oryza sativa
  unsure (1)..(321): unsure at all n locations
agcttctatgtatatatgctatggccacaactcgttatataatctaactgctatattatcatgacttagacgtatactaccgctggcagccagcaatgctactagcgcaatagcaatgtgtccaaacatctgctaggcctaagctgacaagtaggccgaggactntcagaggatacatagtccataatgcaacacggagaggtcacaagcgttcacaacaggcctacagtcctcgtttcgcatggcgctacccctagggtggattgaggaacatgtgaccaagtttagcagcgagaaacttangtgggtgagcctaacatg

SEQ ID NO: 78919 - DNA, 480 bp, Oryza sativa
  unsure (1)..(480): unsure at all n locations
gggtctgctgcgcctacgttgcccgcgagcccacattttttcttcttacgtgagactatcactagcctcatactactgggtaacctacacattcgtttcaatcggcccctgctggatacccttcgcatccctctacacgttcccttactcgatcatgtactggtttggatactcgatcccctaatgttcattccaaaactggctgattccctccccgagtgtataagacaataatttgttctcatcgagggcagccatctgtcatacaagaaacatatgctaagtcaccagacattgatggttcaacaatctaagtcatgtatgctatgctgaaatgtcatacattataaccctacacaaccnttcgtgctatagctaattactaatcgtgatatagcctaactctatgtgaggtatactatacaaccctcgctcacgaataattatatactacgtctagtatcagatacaatattctat

SEQ ID NO: 78920 - DNA, 430 bp, Oryza sativa
  unsure (1)..(430): unsure at all n locations
agcttgtggctggtagttaaacatcgattnttcttttgagatagagttcgatcctcaactatttctcgcgatatcttcttaccgaagtttgttagggcatctataacagcctctggtttaagtgggcaacccggcaagtagacgtccacaggaattaacttatcaactccccgaacagtactataggaatccgtactgaacattccaccagtaatagtacaagctcccatagcaatgacgtattttggttcaagcatntgctcatataatctcactaaagagggagccattttcattgttactgtaccggctgttaaaattaagtccgcttgcctangacttgatcttggtaccaatccataacgatcaaagtcgaatcgtgagcctattaatgaagcanattcaatgaaacaacaactggtaccatata

SEQ ID NO: 78921 - DNA, 462 bp, Oryza sativa
  unsure (1)..(462): unsure at all n locations
ntatgttcggcgcagtactaatactggaacttatgagcaagatttgctctatcaatcaccatctactttagacatatcttctgaaagctttttcaaatccaaaagtccagtatcttcctacaaattagtgaattaggaggagctctctgtgccgaaaaagaaagagcagggcaatatttcaaacttgcattcgaactgcgaaatatttatacaaaggaggagagatcaagataatgcagcagggttggttatctaattggctagtcaaacatgaggtggttcatagatctttgggcttcgatcatcgaggaatagagactctgcaaattaaagcagaggattgggattccattgctgtcattttatatgtatatggttacaattatttacgttcccaatgtgcttatgacgttgcacccagtggatctntagctagcgtgtatcatcttacgagaatacaga

SEQ ID NO: 78922 - DNA, 495 bp, Oryza sativa
  unsure (1)..(495): unsure at all n locations
agctntaagaatctttcacatatcattcatttaatcaaaaatcgaaaagggtagaggtaacctgtcgtaatcccttcggtcaggtcgtgcatcaggcgaattgatagtatcaagtactaagtgataaaagttaatatgatgacaaaatgatcctacgacagtccacacgccactacacaagtaagaagcccccctgatcttactcggtgaagatagcatcccccgacgacgcaagaaagatatgacagctcggcggtgactctctctcccgagagcgccgtccgttcccaaactcgaggcatcaaatcaattatataagtccagacaattagactaatctgattcatatcgaacacaaaaattagaataatcatgctccatcagcatggtaaaaacaatagtaataatctgggcatgctggagtctaaacaacacgcatcagacannatcgtgtaccanaactacccatttgcaagttatggtacaaattacagc

SEQ ID NO: 78923 - DNA, 505 bp, Oryza sativa
  unsure (1)..(505): unsure at all n locations
gacctatgatactcagcttgtaaggtctggaagactgattcatggtgctgcattcggactatgttagtcaccctggttgttttattgtgaaagcataatggattaaccaaattagtgtaccattttatttatcatgtattcagtgagtcaatctacaactattcttctgctacttatctacgtgtttatgagaatccacacataattgttggctgacacacttagcagcttggagtattgttagttatgttaaaaacttcatttttgtggttggtaatgtattaagtccttcatgcatgagtttgatttcttttgcaatgtctttacttttgcagaacttctgaaaagagggtcagtgcagttgctattagcaatgatggcacatatgtaacttttgcagaataaattggtgttatntggttagttaccatggnggaaagtggtggagagcaggagccaactgataataaacctgtgtcaatttttggtcactactgcagtatta

SEQ ID NO: 78924 - DNA, 405 bp, Oryza sativa
  unsure (1)..(405): unsure at all n locations
agcttcagcgagtatatcttattaggtcctaaaagtagttcactaacaatttaaccatcgctagtagccaagaatacttgcatagctggcttaanaatcatcacaaacaaatgtcttangtctcaacacagtgctccttacctcgaaaaagtctgtcttatatgcagcccagaagaagattactgtcatcattgccaagtatccaccgaggacaactccagttgtaaaaatctcagccagcttccagctgtcaggtagtggagatggtttacccgatcctttgaatagtcatgatggtacctatcgatcacagtacatagttgaatatctatatatgctcatagattctattgtcaagaagcaagtgtgaacatgtgcagtggatgtgtgccggtgtgtgtgtgt

SEQ ID NO: 78925 - DNA, 412 bp, Oryza sativa
  unsure (1)..(412): unsure at all n locations
aaaaactaagcttgaccatgatatacattttacaatcgcatgtccttcttttctgcatggacgaggataacttggaaacaaacttgacatataattgtaaatatatatatgattacaacacctatcattattatccaagcagaaatggtagctctaacattattaagtacgggcaaggattttgagctccaccattttcagtcatgaaaaaaacaagagagaagagctctaaaatctanagcatctacagatatcatataattatctttgggcatggttgggtgaacaaggttatgcctttcacagtgaacttatcaagaggacatattccaattcactctctcgctgcctgctgatgaaagggacctcatgatacacctcaaattgaacacggacttaaacccgtcttaca

SEQ ID NO: 78926 - DNA, 440 bp, Oryza sativa
  unsure (1)..(440): unsure at all n locations
acatggttaagaaatggattatgttatgtcagtaccgctttcaatttgaaaaccagtagtccatgtaacatgtatttgaatagattcgcaccattgaaaccagatgaatggctcatttgagcattttgccaaacacgagtgactaaatcgcacccacctttgcaagttgtgataacactaatgtatttaacctttttatataaaaaataaagacgtgtctatcttcagttggctttgtgcatcgacgtgtgcattgttntttaatagaataataattgtggatcattgactgagtttggttctgaataatataactcattagtaaagtacaggaatanagtctagaatcatgnggcagaagtgcagcgcaaaagttctttcggtattatntacctctntgagaaggataaacgtttatatcttaacgtaaatttggatat

SEQ ID NO: 78927 - DNA, 483 bp, Oryza sativa
  unsure (1)..(483): unsure at all n locations
tactactacgccggtattaatcttgccagacatccataaagattttgtgatctattgcgatgcctctcgacaaggattaagatgtgttcttatgcaagaatgtaaagtagtagcttatgcgtcaagacaactaagaccccatgaagataattacccaactcatgagttggagttagcagcagtcgtacatgcgttgaagatttggcgacactacttaattgggaatcattgcaagatctataccgatcataagagtttgaaantatattttacccagacggatcttaatcttcggcaaaggagatggttagaattatataaggactacaatttgaaattctttaccatcaggnatagtaacgtagttgctgtgccttaagccgaaaagcttattgaatctacaacatgaaataatatagaacaattgaagcaaaaatgcttaactaaatttggtattataagttggagaataacacttggagt

SEQ ID NO: 78928 - DNA, 443 bp, Oryza sativa
  unsure (1)..(443): unsure at all n locations
aatgtctcaattgggttatatgatgttagctctacgtataggttcttatcaagctgctttattccatttgatcactcatgcttattcgaaagctntattattcttgggatccggatctggtattcattcaatggaacctcttggtggatattcaccagataaaagtcagaatatggttcttatgggtggtttaagaaaatacattccaattacaagaacttgttttttatggggtaccctttctctttgtggtattccacctcttgcttgcttctggtccaaagatgaaatccttagtaatagttggttatattcnaccctttntggataaatagctctttactgangataactgcgtttatatgttcggatatattacttactttgatgggattgcgtgtcatttcaaatacagtatactaagagatcgtgatcaaatcgta

SEQ ID NO: 78929 - DNA, 436 bp, Oryza sativa
  unsure (1)..(436): unsure at all n locations
tcagcttttatattctggcatcagctatttgccgcagaccttccctctttatcgtcaccgcagtagagtgtaaccacccaattccggatggattggtgtggttcctctacgcctatgacaccagaatatctaaccatgaaccacgaaaggcatgagagaaatattggctaataattgggaagccccaattcttgactggaagggacaccaaaagcctctgccctccctctctatctatccaagagatggaagggcagaagctttttttggtttttcatcttttcatcanagagttgaacaatgaagatagatggcaagtgcctgatcgatntgatcatgtcgtgtaggaacaaggttcanatcgttcgttcgttaggatgcctcagctgcatacatcactgcacttccacttgacacctatttaaacggctcgtct

SEQ ID NO: 78930 - DNA, 381 bp, Oryza sativa
  unsure (1)..(381): unsure at all n locations
agcttgccgatgactgccgacngctgaaaacctcgcagagtatgactggcaacaatgcggcagtgactaattaacctcacggatgacaggcggcgaaatgacattgtgacgaagcttgcagcagcgcggagcaacggctggacgttataccggcatataatttaataaattctaaaatttggaatccaacgggatatatacggagtatatctatatatatacacagaataaatgaaacgtctaaattcatatacatgcaaagaaatcaattcaacgtaattaatggccttgattctacctatagctcaacaaatggcttcgctcgtcactctttctttcattcctcgtagaacggtccagattaactcgtgaaatccggac

SEQ ID NO: 78931 - DNA, 475 bp, Oryza sativa
aactaagcttgccatttattctaactccatactgattcgctctccgttcttactacgctatctgtcactggataggaggatcaccagcctgtcgttatgagatttttacagcataataatacaggtttagtactattgtatagtaataatctttttatggaagttaatctgtaataatggtaaaaaaatataattgttgaatacttgaatcaaaatctgacatagataaatggattcataggtacggtgaatcatctcagacggtattgataggaacgaccagaattaattagtactcatattgtcctttcatgctaaaatattagatattatagtaaactagaatacatcttatcttactatcacaaatttaaatagtcttagtactagaatttataatattaggatgggtttcattcaatactaataactttatgtttgggccgaaagaagtagtaatgatcaaaatactaca

SEQ ID NO: 78932 - DNA, 364 bp, Oryza sativa
  unsure (1)..(364): unsure at all n locations
agcttgtattgtcaatttgaagtatgcaagtgcaggtgccaccctgttagagcccatcttattcttcatgacctcatatgcctccactacctttctctcctgcagaagcgcttcgaagacggcgtggtagtcagatctggcttgggaaatgccccaatggcacatcttgtccaagaatgctactgcattctgagcggaagcgtactggcacagggaggaaaggacagcacgacaactggccgggtcagggtcaaggagaagcgagggcatgcagcataggaggtcggcggcagcagcggtgcggttggcctggcatagtgtggatgtgaggatgtggaaggtggtggcatcangggagactgat

SEQ ID NO: 78933 - DNA, 414 bp, Oryza sativa
  unsure (1)..(414): unsure at all n locations
tactcagctattctactatatgttaaccactgggttcccttctcttatgttatttgaagcatcttcgcttgcttgatttgacaccaagaaacagagaanaataatgttttttttgtgtgaggaatgattcttagattatgaaattcatggggacagacgaagcagctgaatgaaaattcatggtacgggaattttttcccttcacaatttcattgagatttaataactatattgcacataattgcgaaaaccaagattaatagcaatgtatattacctgtgagatagaaggtgaatgcccatgggtataggccaaccatagaacacaaaagacaagaagggataaactgaagaatctgtgtatgaaaaccatagcctgaatatagatgataaaattagctgatgtcactgaata

SEQ ID NO: 78934 - DNA, 81 bp, Oryza sativa
aactgcggaatcgcgtgtatcactcagagcatgaaacgttcagttgctcatgtaaatgtgtaacaggtgacactattcata

SEQ ID NO: 78935 - DNA, 413 bp, Oryza sativa
  unsure (1)..(413): unsure at all n locations
tgccgtcagttagcagaatggcgtagccagaatattcatattcttgtgtatccgngaacttgtcggggctgcgctttcgcagtaatcaactgcctaatcatgtgtctgatgcaatgcacgcctgtggtattgacggncaccanntgacggtagaaatcacggaaagcatgatgatggaacacgataccgaaatctttaagcgcattcagatcctgcgtgatatgggcgtgggcttatcggtagatgattttggtacgggcttttccggattatcccgcttagtcagtcttccggtaacggaaatcaaaattgacaaaagttttgtcgatcgttgtctgaccgataaacgcatccttgccttacttgaagccattaccagcattgggcaaagcctcaatttaaccgtcgtggcg

SEQ ID NO: 78936 - DNA, 383 bp, Oryza sativa
  unsure (1)..(383): unsure at all n locations
agcttatgctttcttgtgactttcaacctgcgtgatctagactagaacaacactactttatctttggtctgtaaatactcttgtatagtgtcatcacttaggcatgacaatataacacttcacattccagaacttacctcgattcctgtattgacaatntgaatctgaataaaaccagtattttgatttttcttttggagcactattgattgtgttagcttcatttctaagaaccactttcccacttaagtcacttatgagtactgctctcaacagatacattgttggtatagcttgaccaccttgcgcgggaaagtctacagttgcttccgaagttgtcaacgtgttaataacgctggtccagaagcacagaatgtagtcac

SEQ ID NO: 78937 - DNA, 460 bp, Oryza sativa
  unsure (1)..(460): unsure at all n locations
ngattatcgagatattacgtttcttttatacttagtgttgcattagttaagtttgatctactaagtcgtacttagaaccataatctctagcttgcttcttgattgccaataaagttcatcggtgtttcagccgangagtnatctggatgttgcatcggcttacaagggttgtatacaagctggtnttagccgatcgcaacanaggttttactgttcatctaatcttgtggatcttatgacatcggacctccagccgatgtatgctttcatactatcggataaatgcttatctatcatatcataattagccgatttgttctactgattatattgtatattatatcagccgattgcttatattattatctactaagatggacttgcataacatatgccgatgctaattcatcggctagcttgatcgatcactggatactcctcggttgaactgatgctataa

SEQ ID NO: 78938 - DNA, 288 bp, Oryza sativa
  unsure (1)..(288): unsure at all n locations
tgcaagctgcttgcctcanatattcctgttctcaaaccatggctgcaaatggcaggatgtgaatttgcagcctacattcaaatttgcctctaaaactctgaattgacactaaccttgaaaactgaccaagaatggcggngatagaaccccgataaagtcctcggagcccaatttgtggaagtgttgatatgagatctggaaatgaaagcgaagatgctcggacacgtgtctgatacaagttagaaaataaagagcttgaatcaganatatccataaaactggtgaatt

SEQ ID NO: 78939 - DNA, 477 bp, Oryza sativa
  unsure (1)..(477): unsure at all n locations
tgctaaagctatagagagttggccggccggngatcctttcttatatttcctatctagctntgtctcgatcgctatatatgggaagtgcatgcaacgaggaggatgangaggacggctgctgcggtgcacccgcggtggcggtcaacaactacgggagctcgacgacgagcagtactacggatgatgagggatccgtggagagcatgcggcgcacgtcgtcgtcgtcgtcggtgcgcccctacttccgcttcaagaaccctcgcctccgttggacgccggagctccacctctcctttgttcgcgccgtcgacaggctcggtggccaagatcgatagccatcctattcctacatatctntgccttgccatatatatagaaagcttaatttcatcatcttcggttcagtctcgtatatatgatccttcctatatataagcgtatctatttaatgtacccattgatctatctcgcgatata

SEQ ID NO: 78940 - DNA, 222 bp, Oryza sativa
  unsure (1)..(222): unsure at all n locations
agctntattatttcttatcggatggacagctttcggactggtgcagacatgcgaacttcttgtgttactggctnggcatctggtcgcaccatgagantgtgctctatcactctcgtggagatcccacgcattcaggaccgttcgcaaacgatcacgtatagactgtcgaggaggaacgcgatgagctcgagtgactacgtgtctcctagtgatgcctcgatc

SEQ ID NO: 78941 - DNA, 349 bp, Oryza sativa
  unsure (1)..(349): unsure at all n locations
ctataaaactcagctgctccacgcatccaatctactgggctgggttgttcttcttacacccataccagtctttgagaaatcaattggaatgntttgtctaccacttgatgtttcttataaactaaacttctgggcgttgctgtcgggatatctaacaaaatatatattatattcagctgataaaaccagcaaaccacctgcctgttgcaggactggcagtgtttgccaagacatatatgccaatgcttatcggcatgacgaaaacttatgaatttccattaatcaacggaaagggagaatgatatgctccttatatcggtgggaatagatgatgatgtatgctggcaaa

SEQ ID NO: 78942 - DNA, 397 bp, Oryza sativa
  unsure (1)..(397): unsure at all n locations
aagcttcatcactctgttctgatataatttatatttgcaacggtgagtaccaatccgactcatcaagccaccacagcaatgatgcacattacagaggatctcaaaggatggctatggctcatttgcgcatagcaagttttgtaattcttttcacaagcctaagacctagctaagactaatcaagttttaataccattgttcatattaaacaatgacggntctgtccaccatccattatgatcccaaggatagctttccgccattgagtcgttatgattttctgaggacgtcctacgttacgcctctcacgaagtggctccatcagcataaaaattatcatgcaatattccatcccactcaagttaaagaattatagtctagccaagtgtaatacatg

SEQ ID NO: 78943 - DNA, 487 bp, Oryza sativa
  unsure (1)..(487): unsure at all n locations
tgtgggttctgatgcccggttaccagtgcggggatctgatctctgtgctctttactctttacctgcagagatctgagaatgatgacatattgagtaatccatttagcagcagatgccatatttaaataatacattatgaagggaatgcagataatagcacactttacgattttggaaatcttgtttccttgtatcattctcttaacgtttcctttntccacaaatgtaatatttgctacggttactttctaagacgtccaattgcctaatcactattagcaatataaaaaatgactaaagtccagtaattatactttgaagaatntgtatcttctcatggtgtaatgcaatgttcttactcgacaggttctactctttagattctggaaatgtggtttgtgctaatattttctaaagcattctatttgtgcatgtctagtttctctactcacnttctaatttggttcanaacaatggtctatttctg

SEQ ID NO: 78944 - DNA, 477 bp, Oryza sativa
  unsure (1)..(477): unsure at all n locations
ttcagctcgacccgggatcctgtgagtcacctgccgcatgaagcttcttccatatatttgttataactggctttcttgatcggatgcgatcttcttatgaacttcatgcaggcatacattccttgccatatacaattccgctaaacgacctccagaataagtggtccttaccggaatgaaatgagccactttggtcagtctgtcgactatcacccanatagagtcatgacccgacgacgttctgggtagtacagtgatgaaatccataccgattgtctgccacttccattcctgtatcttcaaaggctgcagcaaacctgcgggtttctgatgttctgctttgactcgctgacaaacatcacatactgctacatattctgcgatttcacgcttcatacttgcccacgaaattcttccttaagatcttggcacatcttagtactactcgggtgaatggagcatacagtatcatgagct

SEQ ID NO: 78945 - DNA, 484 bp, Oryza sativa
ctgacgaaacgaacaggtatatgggccgaatcacgaagcttcgattattatggctacagtcccgtgccagcacgatggaagggcaagtgccaaaccggcgcggcgttcaacgccaccacgggttgcaacatgaagatcatcggcgtacgatggtactcgggcggcattcccgacgagaacctgaatggcgagtacatgttggcgagggacctctgcggccactgcacgcacggtgcctctacgatcgtcggcgggcaggtacggaacgtgagccacagacagggcggtgccctggctgccggcacggcgcgcggtggggcgccgcgcgcgcgggtcgcggtctacaaggtgtgctggggcctgcgcgcccagtgtggcggagccgcgatcctcgccgccatcgacgacgccatgaacgacggcgtggatgtgctgtccctgtcgataggatgcgcgggcgagcattacgagacgctccacgccg

SEQ ID NO: 78946 - DNA, 457 bp, Oryza sativa
  unsure (1)..(457): unsure at all n locations
gcttatacagtatgttctatgctgaatcacattcaanaccaaatatgagtctgaagcacagttgacagaagcttattcatagaatcaccagtagatgaggcagacagtggataatcaaaatccagtgccaaataggcaccattgagctatgcatattagaacggccaaccaaaagtgtctcgcttaaatgaagaatgaataagggtgacagttacagacatatcctcaggtgaaattatgtaccttcaagcattctatgacaagaacctcacaccaggagaagagatgcaaaatttctccattgtttctcaggacatagtgcttcttctactctgctccgactgagaattgagcatctatactaactttctctgcttctcatatatgttcatcaacgaacctttgcactacctgaagaaatgaatcatcactgtccatgtgtaagtcatattataat

SEQ ID NO: 78947 - DNA, 434 bp, Oryza sativa
  unsure (1)..(434): unsure at all n locations
tgcccgcggtacaccgaacacgcacttatcggngttcagttttatgctggcggagcggagactctcanaagtttccgctagatccgagagtaaggtctcttggttgcgcgtctttacaaccaagtcatcgacataagcctcaacattacgtcctatntggctacccaaagaaattcgagtagtacgttgaaaagtaggacctacattctttaacccgaagggcattgtcgtataacaataagttcctatggnggtaatgaatgcattnttttcctcatccttcctagccatgcgaatctgatggtaaccagagtatgcatctagaaaacacaaaaggtcgcaccccgctgtggagtcgacaatctgatctatgcgaggcagggggtaagggtccttaagacatgccttgttaaggtcggtgtagtcgatgcaca

SEQ ID NO: 78948 - DNA, 345 bp, Oryza sativa
  unsure (1)..(345): unsure at all n locations
agctngcattatacacctcagttcccgtgacttgctgagtacgagagtactcacccttgctctatataaatatatatatatagttcctccgctctgaagagaagataaagtgaagtgaagattatggtttcgtcctggttcccagccgtcgcatgtggtgttgggtgttagaccgttggttccgctgctgctgctgctgntggtngtttctcgtccgcgtcgtcgggtgtattctcgggctgtctgagctgcaacctaagttaaagtaaataagtcctctatttattntaaggattgctatgattcatanttgtcaccgtgggtccagcactatgttctgggact

SEQ ID NO: 78949 - DNA, 475 bp, Oryza sativa
  unsure (1)..(475): unsure at all n locations
agatactcagctttgcctctgtatatggtctcattatcaatgtaatttttgtcatgccatctgatagattgatgcgtgattgctttctgatgggcaaacaaaaaaagtactactccctccgtcccattttaagtgcaaccataagttttcacgcccaaatttgatcgttcgtcttatttaaaaaaantttataattagtatttttgttgttatgagatgataaaacataaatagtattttattcgtgacttatgtgtttaattttttaaaaaaaattaataagacagacaatataagtggacgcggaaaacatggctgacttaaaaatcatggagggagagagggagatattgcagctgccaatgctatttgctggaataacaacagaataccatcgcaaatggtatcttatgacgtgtatactcgactagactgagtagaattggagatgttattgctctgggacatgtgtcct

SEQ ID NO: 78950 - DNA, 396 bp, Oryza sativa
  unsure (1)..(396): unsure at all n locations
agcttggattgatgatgactacagacttgcttcatctactggctctgtcagttcacttaatccaaaggagataatagcttatcttcagaagttatcagtagttgacagaanaagctttcccccatctgtacaagaagaatgggatgcaaaatatttgcaacttctttactcactctgtggagatacagctaagtaagtacatacatacagcaagctcttattagtatcttgtagtgttcctgacggtctttttatgcatgtatcaaatgagcttgaggcaagagtatattcataatgtggagaggcaatacatgcttggacttagagctaaagacccagaaatgaggaagcgattctttaactttaccatgactatgtcggaaaaacattatttgc

SEQ ID NO: 78951 - DNA, 478 bp, Oryza sativa
  unsure (1)..(478): unsure at all n locations
tcgtgaagaccttgagcaaggcaagtcacccttcgatctattgctcctataatcgaaaattcattattattctgtttgcaacttgcattattagaatcacacacttaacttgcttggcctcggtttgcgtgccaaaaccgacggacctacccagtagtcgcactaatttccgtaggtcatactaccctgattccttgtcgctccacccttgtggtacctcggtattcgtgttctctgagcacgtataccaaatatcccacatacaccattgnttgtcgaaaacttgggaaatgggtttgtgaagccttcaaaacccgacatgtggtgtcggtgtatttgaaaataaaatgaattgtgaaaactcgcgatgcggtggttgtgcctatgtggcactgtnccgtattcgcatataaggaccgattcctgtgggaaactcatcgaacataatcaaagtgcaaccacaaagtggaatgggaca

SEQ ID NO: 78952 - DNA, 394 bp, Oryza sativa
  unsure (1)..(394): unsure at all n locations
agctttaaatctgggttcaaagtntntcaaatttgagatgaaaagttgaaagtnttcataatttgactccaataaaattcaaacttcaagttgaaagtttctaaatctgggttgaaagtcttaaaattttgatttcacgtatagatttcttttcaatctgttacttaaaaaaatcttcgaaaaaaaagacaaatctacaaaatcttaccttaattaggtcattatctaaaactaatcggattagttactttatatgtacgcttctccggaaacaaatcccgaaaagaaataggataccgtgcataataaatcccataaaaaaaggttaccgctccacgcgtgttccctgggaaaataacctaccactcgcgtgcgcgccgtcagcgcgcgcgtg

SEQ ID NO: 78953 - DNA, 488 bp, Oryza sativa
  unsure (1)..(488): unsure at all n locations
tattacggacctatgatactcagctaatgagcaaggatggagtgngagaagtatagcttgcatggtcataaagtgttcaccgggtcacaaacaacgatgatgaagaagactaagtttaactggatggagatcaaagttttcttcctaaggttcattggcatgaaactgtctatgttgaccttgttgtccgtgatggtgaattggcctttgtaccgaagtcaccgtcctattcagatatgtatctcgatacatctgctacgaataattggtcttatagattangacacggagctacaatagaatattggggaacagaaagagcagactatagtatctgggttgacttcgctgatgattgaattttggatcgttntatttaatatatgtaaatttgntaaatatgtgttgtatagagggtattgctattttcagccgggtaaacgaaatttntttatcagtaacacatgctataagaaggatntatcttt

SEQ ID NO: 78954 - DNA, 413 bp, Oryza sativa
  unsure (1)..(413): unsure at all n locations
agctggctatgtctgacataagtggatattntggcgtaatacanagccaaatctgggctacttcatctgattcacctgttcatgtaatttcacttaaaactctcattcgagttgttcgaggttctccaaaggccttggctccttaccttgacaaggtattaaatgttcttcccttatttgagaggactaatgcagctaacatgcattgtggcttccaaccttntataaacatacntttttaatacattgcaagccttttgtttgtgagaagcatatgctctgtngatatttacataaaatgtgtttgatttaacctcaaatgctttgctacccatgatattgagacctagatgtgtcggaaacaataggctgttttacaactgcatgatatgcatcatatgtcagactactga

SEQ ID NO: 78955 - DNA, 438 bp, Oryza sativa
  unsure (1)..(438): unsure at all n locations
nggcccagcaactaggtgagttattntctcctcccgcagtcttgccacgctgctcccctctatccctattgcttaccccgccaccacgctaaccccgctcaaccaaaccaaagctagcttcaaccatccctctaaggccaaccatctccgcccacgtcctcgtcccggtcccactccattcactgttgagcttttgactgtagtttaatttaataaagaacatttggtcaaacatttggtccacattatatgcagttgtcttttttatgatgctagctataccataatctttcttatgatgctagctataccataatacatgatgagcttagggtagggaccaatttatntattcaactcccaaattctccctccgtccaaaaaaaaaaggcaaaccctgtgtttccgtgtccaactttaactgtgcgtcttatatgt

SEQ ID NO: 78956 - DNA, 276 bp, Oryza sativa
  unsure (1)..(276): unsure at all n locations
atactgcatgaactggttccctagtattcctatgaaatggttaatgttggtgtggacagtgataggagctctagaacacatacaaaatgaacattttatcttacatgtatttgtcaaagtagggtaaaaaagacaatggattaatattgatcacaacgtcaaactcgttgagagttcgagaggggaaaagaatgctatacgatgaatcattatatcaacaaagatgcgatactctaacaaatataatnaaaaaattcctagagatgatcttaccac

SEQ ID NO: 78957 - DNA, 455 bp, Oryza sativa
actcagcttattcaagggccatccaacccattgaaaatccatccaagagtctcttcttatgtcaaggataaagggctcacactccataggatatccaccggacatacctacaagatgtcactcactcctattggacatgcccacttctctcttggtttaggacttgagaatactcatcacacttggttagacaagcccactaaatgcacctacatgcatatgaactaatatgacactagatcatccacaagctcgcttcatataccccttctgatagtacagcgcctatctatcaaatccggtctacaccaaacaccatgaccgggagaagactaagaaaacattcttagctacattatacctttgccttgcaccatccatctttgggtcaagcttgagccgagatcaacacttgtgaccattccgttgaaccatgtttatgccgaaggcttgtc

SEQ ID NO: 78958 - DNA, 358 bp, Oryza sativa
  unsure (1)..(358): unsure at all n locations
ncaagctgaatcatagtgggaaggaccatacatcatcaaacacaagtccaggacaggatcttttcgcctagcaacactcgaaagcgaggagttcgatcattcctggaacgccgcctctctcaagcgcttctatgcctagaatgggtggcacccaaatcgccaacttgtaaaaatgtacatacagtcatgtaagcccttcggcactatataagcctttcggcactatgaaagcctntcggcaagaaaaaanaagaagaanaagagaanaagaacaaactggatgtagggctattatccgctatggaggcccgaaccagtataaaatccctgtgtnctccgccttcttcttacttttcgt

SEQ ID NO: 78959 - DNA, 384 bp, Oryza sativa
  unsure (1)..(384): unsure at all n locations
gcgggagcgacactagataattattacatgggcagcgaagggccaccacacatgaagacaaacganaaacagcggaagactaaggcgactaccacaggcgcttgatggcaggcacgagctaaacaccaaagccctcatctctcacgaacgcctactctgagcatgggacaaaatgagcaagactgaatacacactccgaactcaacgagacacactcagtagtgctgaanataggcaagggagtacaacggagccataatatagggcggtagggntagcagtagacagcatcaaaagtcacttagatgctcaagctactctgtaacacgatcctacagctatgcatactattaatgaaggccggaaccccactaacctgcttac

SEQ ID NO: 78960 - DNA, 473 bp, Oryza sativa
  unsure (1)..(473): unsure at all n locations
agcttgcttattatattgatgaaagccgatggaggcaatggctacaagataccccatatgaacaaggatcgtatggagaggctngacatgctccctactagtctgacttgtgatattgcactttacaacaaggttatgcagaccttgttgaactagtccagcctggccatacttttgtttttttactccgatggagtntgtatgtatgtggtaatgcacaccttgttaaactagcctagcctagccatacttttatcttttgtactccgatggagtttgtaagtatgtggtgatgcagaccatgttgaacaactagtccagcctagccatacttttgttcttcgtactccgatggagtttgtaatatgattcagacttctgtatatatangtaattaacataactagttttagcaatcagcaatatgtgattctatatntaattcagcactaatttcataacaatgatactta

SEQ ID NO: 78961 - DNA, 480 bp, Oryza sativa
  unsure (1)..(480): unsure at all n locations
ttaatgaactaggatggttcttaataacctgccatttatnattttttatcangaacactccataaggaaaggaagacagaatagtataacagctcaagtagcaatcatattgacagcaactgaacatcaaatgcaaggaagtaacatggcaaaggtataaagcaatgggcgagtgcaacctatatgagaaaacgatcagctatccataaacaaataattgaaatcagtagaatgaggatcacctgatacatctctggctgtgtgaaggagggctcatcgatttcattatgtccaaatcgtcggtaacagatcagatcgactaccacatcagaatggaaagtctggcgccactcagctgcaagctcacaaactcgtacaactgcctgcagatcaatcaccgttacatggaatatangagcgttcaatgcttttgctacatccgtacaatactgcgaagatctgccggctcttggatctgtt

SEQ ID NO: 78962 - DNA, 402 bp, Oryza sativa
  unsure (1)..(402): unsure at all n locations
ctcgacccgggatctctaagtcacctgctgcatgcaacttctttatttatatggatgattaggaatgaataatgtgtctttgctcagagcacgatctttagattctcagtactgtcggactgtgatcaangtcagtttcttttgtgtctgatgggaacttatattatatggctctatgcacgctaatntagttagctctggatctatatgcactcctaaatgtcttcctcatgaataatgtgtttaaatcctagaatgtgctgcgctagaacataagacgcatgaatgctgataccaaactatcttctttgaggcaaaagatagacgacagtggcttgcatgttttctatgttctatagaccataaaacataatatctcttaggctgatattaagactattg

SEQ ID NO: 78963 - DNA, 484 bp, Oryza sativa
  unsure (1)..(484): unsure at all n locations
tgaatcaagagcaccttgctctgataccaattgaacgcgctgatgaagcctagaggggggaggggtgaatangctgtccctganaacttataaacaaatcgcagcggtaaaatttaaacagacccggaactttctggtaaggaactccggaactnttggcctgccaggcccggaactttcggtgttcttatgacagaaacttccgggttacagatggaagatgaaattcanattttgaaactggagactaagccaatcttatcaagatgatgcacaggtattctaagcaggagatagatcacagaatcatccacagatacatcatagaaagagacaagagcgattttntcccgaagttcggatcttgcgatccaactctccgttgaggagctccaaagagttgggtctcgattaacctcctgcctcacttgtgcagtaacccagaggaaatcacaaccttcaaccccaacacccctagcaaatt

SEQ ID NO: 78964 - DNA, 483 bp, Oryza sativa
  unsure (1)..(483): unsure at all n locations
agctttcttcttaccatgcgagcccagacaaacaagagtcgtgctntgcacatgtactagtcggatgtaagctctacacatgggccaaatacatagtaatttctttggtttaagcagaattagagcatgtgcgggtgaggagcggatagtttcnggatgttggaaacgttgcatagttggtgcggactcatctcgaaagcaaattaatattgtcagatgttatgtgtatatgcaatcgataagacaataagttgctcgccgtcgtgtggtgggttgtcgccgcgttgaggataacgtcatcacgaggctagagcctacgtcagaaattatgaggtgggaggggaatgaccgagagcctanaataacagataaattgggttattgaatggacacgttattgtgtatacaatagatagagtggtagcgtaagttacatttttggatatctggcaacatattctggtgaaatgcagatatacatat

SEQ ID NO: 78965 - DNA, 430 bp, Oryza sativa
  unsure (1)..(430): unsure at all n locations
tcttcgtgttgttccccgcaggtatcgtcagatggccttgtctattgaaacattgattgatctcacgactttatccatcgaggacctgactggccggctcctcgccgttgacgaccatccggattccaacggggaagacgtgggccaggctctgctcggggaaaaggaggcacctgctcgcaacaccaagcagaccgggcagtcgtctcgtgacactggtatcgggggcgtcaacacagggtcacgccancaagggcgcggcgggcgcgggcgcaacggcaacggtggcgacaccaagtctacgccatcacagacgggaagccgcaacgtctccaaagacaagtgccgctactgcggcaagctgggccactatgccaaagattgccacaaggcaaagcgtgatcgcgaanagctggcccaggctaatctc

SEQ ID NO: 78966 - DNA, 418 bp, Oryza sativa
  unsure (1)..(418): unsure at all n locations
agcttgtttgaattgtttgttactatcatcttcgtacatgggttgaatgaatcaataacttctccgatcacccgcccaacaacaagaggctccacagacctagacatggttggagccttggagggacaggtaattatatnttccgaaattagtgctctggctagttgtaaatgacaaaacctagtgcacttcaatgtgcccttggttgcttattgngcattgtagagtgatgagcctctatttatagtggcaagaagcatgctgtcttctttcaagttgtagacttgtanggatatatgaatagaatttccaccagaatcataagatatgtatgaatgtgcatcatttgttgatctctattatacatattcctctattccaggcttcttttgattaatataatttatatgcatgtcct

SEQ ID NO: 78967 - DNA, 492 bp, Oryza sativa
  unsure (1)..(492): unsure at all n locations
acctataatactcagctttcnatataactatggcatagntgtagtataactataatatatttatactatagntacattgtaactacattgtacttacaatatgcttacattctaatcttgatataacttagctataaagttgcatattttttaatccttacaagtcacattgtagttatagtataattattgtagaattaaattacaactatactacaattatatttgaaagttttttacttaaaaaaattgtggtactttttttttataatcccttttttatatacaaaacacactcctggagacacaggaagtataatataagaagcgctaaaaagataaatatttccatatagggtatgtttagcanataggatatgggaggtcggattgggaaatggaaatagatgaatggctaggattaaataaagtgtgaagaatggatggctaagatgcaatgtngcctttttggagggtgggatattatttctc

SEQ ID NO: 78968 - DNA, 410 bp, Oryza sativa
tactaagctggggcaagtattcgcagaaagcacgcacaaaggttcgattagatagcagctcagatcagctcttctcaggggaacaatcagaagcctcgcttcatgacgggacagctaggtgggcctttcaccctgaacggtctgcagcaccgtccctatcacccgagtaactttgacaacgactactacggtggcagtcacaacaacagtaagcagcacaaccacaactcgactccacccgcactaatggcaccagctcagtcagatccgccagctgtgtcaattcagtctgaacaacccaagaaggtggctgtatgatagccatgaccctgctttaactgtggcaagcacggccactttgctggcaagtgtccgaagctgaatcgcactggacccaggttcattcaggc

SEQ ID NO: 78969 - DNA, 252 bp, Oryza sativa
ttttaccttccactttacagtcggcaattgtcttttgcatattcgcttactgccactctgtaattaaaaactgtgctagacttttattttcttctcagcttctggaaagtggaaccagcagtcagagaattgttatagcatttattatcgttacctattattttcgtttcacacagactaagaatgtatatttatataaaccttgagattgggctttgtgaccttatatatattgccctttgatgacacctg

SEQ ID NO: 78970 - DNA, 492 bp, Oryza sativa
  unsure (1)..(492): unsure at all n locations
ntctgaaagatgtggctggagaaaatattagcttataagctttctgaatagatgtggttgtggagaaaacaatctgaagaagagatgtctntcaatattattatgactntgtttgtaacttatggcttgcatgtggtattccagcctcaagcttatcactgaagttactcttcacatgcaggcccctcaggcaaaatcatgcttctacctgaggatgatccaaatgcaacccatatcatgattgctactggcactggtgttgctccctaccgtggctatctacgtcgtatgttcatggaggatgtcccaagtttcaagtttggtggtctggcttggctatttctaggtgtngctaacactgatagccctctgtatgatgaagagttcacaaactaccttcagcagtatccagacaatntcagggtcgtggacccttntatgccttttgcttaacatcttgtcttggtctatccagtatttcagtgacatggt

SEQ ID NO: 78971 - DNA, 497 bp, Oryza sativa
  unsure (1)..(497): unsure at all n locations
cctataaaactcagcttcggaccttgtaaacaattgtcttagattagatgccgaatctttgtagagttatgtcgtgattctagaataactatataatggctttcatcagtaatatgccctcgaaaggtgcttcatttttatttaaagatgactggtttattcttgaaaactgaatactgttctgtatgtcatcttaagcagctgattattaatgtctgctaatgaatgttattgtcccatgccaaggtaagcttttgggtggttgatcctgaatgcctgcataatttgatgcaattctaagacaagtgctacagctttgaatagctntaacatagagtaatngttttctcttctggcccactggtttgatgatcaactcccattacttctactgcggagtaaagtatgtgtgcactgtcactgatcagtttatagggtcactctatactcttgcaattctataggtattgttagacccataaaccactttcacatac

SEQ ID NO: 78972 - DNA, 286 bp, Oryza sativa
  unsure (1)..(286): unsure at all n locations
aaaagaaaccgaagagcccacctagactcacagcccaccggcaagccgataatgcagggccaaggtgaacgaataggcgtaagctttgcagaaacagccttaaaagtcacttagtagcccaaagccatattaaacagacgatcctagagctacacacgtatattaatcaacgtcgtgaacccgcacgaaccatgcctaacccaaggcctacgatgattcagaccgaactggcaacccgaccctgngtcccagctcgctccaagccaacccatgccaaccactccac

SEQ ID NO: 78973 - DNA, 486 bp, Oryza sativa
  unsure (1)..(486): unsure at all n locations
tacattattgaaccttgagatgaatcagctccatgctcttatctgcaagaatgggagttcatggataacctagctaatagcaccgagctacaagtactctctcttgagaagaatcaaatggaaggacaggtaccaagttcactaagcaatntttcagttcaacttcagtatctttacctgtggctcaatagattgtcaaggagttttacttctggcattgcaaaccttccatacctgataattctggcactggatgacaactggtttacaggttctgtaccacaatggcttggaggtctcaaaacattgcagagcctaacagtgtcctacaacaattttacagggtatgtcccctcctccctttccaatctatcacatgtgcatggagcttttctagagtcaaatcagttcattgggaacatacctccaagccttggagaccttcagttccttacaacaatcgacatttccaataacaatcttcat

SEQ ID NO: 78974 - DNA, 380 bp, Oryza sativa
  unsure (1)..(380): unsure at all n locations
gcttcactngctcgtgcgttcgctttcgtgaatgccctacgtcgtcgtcgaccttgtgggggttcgcccacggaggcaatttgccgttataaacccggttcgaccggccgaccgcatatcgtgtcagcagttggctatactcgacgactgacacgtcgtcgatcatcttacgggcttctgcattggcctggatgagggtctacactgcataatatagagggtgcagccacattaagcgtcgaacgaagcaaaattacgaagcgcatgcatgcatagcgaaagtgcagtcttaccattcgtgcgctcatggacaaccaatttcgggagaccatcaacctcttcgccttggtcacacgtgactcgcatgactangagagggg

SEQ ID NO: 78975 - DNA, 477 bp, Oryza sativa
tatcaaactcagtcattatctcatgtttctctgctattacatgtttgacggagaacaactataaaacacaagtatttgaacactgatataagagtattatggttgcttctgactagcgctaggcttatcaggtactgcatttgctccagtgaccacttggcgattggcatgtctgcttccttaacaggtactacaggttgtaacagacaataactttcttacgctcgggttcttcatcttgtacttgatttctttggctgctgtgctggaacatccaaaggtacaatgccgatactggcctctgtcttgtcaactgatgagctggggctgaaattgagcattgacaccttgtggtaatgcactcgctagagttggagctgttgcaacgcggtctataggactgcttccggatgcatggatgacaattcgctgaggagcaagcttctgattgcaaggagttgcgtggactgacgtgct

SEQ ID NO: 78976 - DNA, 453 bp, Oryza sativa
  unsure (1)..(453): unsure at all n locations
ctatgaaactcagctttacagaactgtaagttataaatctttatggtttgaactgtgcacaattcattngtttcgagcacgctgatgatttgngtttagcgttttatgtgacggatgcctgttgaactgtcctgttttgtgtttttgtcaagttctgtgtcgaatctatgcgttcattcgcgctcaagctacatcggtattgtcatgcgcatatcatatgtcaagcggtaccacattggtatttcttttccggtagcttcatgtactatgctgtcagaaatttgcgaacggtctaatgtaacagaagatacatctaaacgatatttaacatttgtcacaactcacttttgcaatggctaggagtagagtttacatcgacctgaactcgtaggctctgtttgcaaatgggatgagggtgagggaaatggatgtatttcaattttcatattctac

SEQ ID NO: 78977 - DNA, 470 bp, Oryza sativa
tgccgtcagctagcagaatggcgtatccagaatattcatattcttgtcgtatccgcgaacatgtcggcgctgcactttcgcagtatataactgcctaatcaggtgtctgatgcaatgcacgcctggggtatagacggccaccagctgacggttgaaatcacggtaagcatgatgatggaacacgataccgaaatctttaagcgcattcagatcctgcgtgatatgggcgtgggcttatcggtagatgaatttggtacgggcttttccggattatcccgcttagtcagacttccggtaacggaaatcaaaattgacaaaagatttgtcgatcgttgtctgaccgataaacgcatacttgccttacttgaagccattaccagcattgtgcatagccttcaattacccgtcgtggcggaaggcgtcgaaaccaaagagcaatttgagatgctacgcaagatccactgtcgcgt

SEQ ID NO: 78978 - DNA, 318 bp, Oryza sativa
  unsure (1)..(318): unsure at all n locations
agcttcgttgttcttttctatcttcgccatgggcaacagcttgttctccatggcgagcagcaccgcttctccttcagatggtcgatccccaccgctgccggaaacactgtcgaagtgcgtgactgcgagcgtcaccgctgcgcacaatttcgaggtgacacggtactcgctgctcgccggngtgggcgccggcgagttcgtcacctctggcaccttcttcatcgacggtcacaactggaacatccaggtctaccccgacaggtggaagcacgagatgaacgccggctacgtgtcggtcttcctgtgcctctgcggcgg

SEQ ID NO: 78979 - DNA, 476 bp, Oryza sativa
  unsure (1)..(476): unsure at all n locations
tcagctcaactggatgtcgctcatgacgccgtcaggagaatctcatcgngctcgagaacgtgcagtggttcgagctcctcgaggggaagcacggcaagtcggccccggccatcgagctcatggggctcggcaggctcatgaacgagaaggcgaggatgctctccatgggccagaggaagaggctccagctcgccaggctgctcgccatcgatcgcccgatctggctcctggacgagccgtccgtcgcgctggatgccgagggtgtcaagctgctggagtacatcatagcggagcaccgcaagaagggtgggatcgtgttcgtcgccacgcatttgcccatcgagattgaggatgccatgtcgctccggctcccgcaacggttccctcggaggaaaactctggctgatcttgtgcgttgatgtggggcaagaattcagctgatgattctattcatctcattctatgaaaccgtggac

SEQ ID NO: 78980 - DNA, 250 bp, Oryza sativa
ttgagctcggacccgggatccttagagtcacctgccgctgcagctatggtgtgttgaattgaagacaggtttgggtcgaatatgtaccaataagactttgcgctactcaatacacagactaaatgatccatgcatcagaacactggagatcacgctacaagcttgttgccgaatctgctgaagcaatttgatatctacactcactggaccaccctatcttacatggagatgtctagttgatgaacatact

SEQ ID NO: 78981 - DNA, 359 bp, Oryza sativa
  unsure (1)..(359): unsure at all n locations
ggcattanacacctaagttcccgtgacttgctgagttctattgtactcacccttgctctatataaatatatatagtttctccgccctgaagttgaagatgaggtgaagtgaagattatggtttcgtcctggttcccagccgtcgcctgtggtgttgggtgttagaccgttggttccgctgctgctgccgttgttggtgttcgcctcgtccgtgtcgatcggtgtattctcgggctgtctgagctgcaacctaagctaaagtaaataagtcctctatttattttaaggattgctatgattcatttttgtcaccgtgggtaccagcactatgtcctgtgactggtaccgagatcgcggttt

SEQ ID NO: 78982 - DNA, 450 bp, Oryza sativa
  unsure (1)..(450): unsure at all n locations
agctntacattgtatattgttatacactggattcacaccgtataataagagacttatatgaaagacttatcatgaagatcaaataatgcatgtcctaggttcaggtgccagtacttgcttatacgctactccctccgtcctataatataagagattttgactnnttacttgcagtgtttaaccattcgtcttattcaaaaattgttggaacttatntattttgtttatgacttactttattatccaaagtactttacgcacaacttttcgtttctatatttgcacaaatttttgataagacgagtggtcaacagtcaagcataaagtcaaatccttatatatgggacggaggagacctgtaatttaaaacatatttatctatatatacaaataatattgtgcagtattatattgacatgtgtctacatttgggcgctgtaaagcgatacg

SEQ ID NO: 78983 - DNA, 415 bp, Oryza sativa
  unsure (1)..(415): unsure at all n locations
gattataagggtagattggaaaagtgttaacttaatgcagttatgatgacccacttaatcctttttactaagattgaggtcttactatggtggtattatttctttgaaaacgaacaactgaaatatttgctcatgcagatngctttgttgcacactttgtgcaccttttatcgtgttgtctgattgctcctaacctatngtagttttntacttaacaactcanagctatatcattgtgacaattgctntatgatcaggctggcgcgctgatgattattggagtactggcaacacgagaaacactagccccanaacttgttcagaaattgatcttctntgntgcaagggctgcacagcatgatgcgctggacacgaaatgattaccatggctccgtgtacagtgatggctattata

SEQ ID NO: 78984 - DNA, 236 bp, Oryza sativa
  unsure (1)..(236): unsure at all n locations
gtggagatgctagaggatattggggacttgcgtcatcaagagaatcagccctcaatacagcaagccagtgctatcaagccagcggaactgtcgccggtgcttnccacatctgcaggatctcgtncgctgacgaaggaggaggagacttgtccaagtcatggtgacatgggtcacgggcctgtaggccactccgcgggaatttcacttcggggaaatgcgaatggggagaatacctc

SEQ ID NO: 78985 - DNA, 363 bp, Oryza sativa
  unsure (1)..(363): unsure at all n locations
aagttgtagcacttattcctcatctctctanacctctgaatgttgtcttgtacangctcatcattgccttgcctaatcgctggtaaatcagaacaattcatctcatgaaccccactataaaaatagctatgaaaattcttctcaaatcggcaactgttgattgatccatatggcaaagaagaaaaccaagtaaaagccgatccagacaaagactatggagacaacctaaccctcaaagcgtcgacagtcgatgctttaccacactgagctaagaatcggctagcatgttcatatgttgagacactgtcttgccctgagaattttgaaaatccggaaccttgaaccggctatgcaatggaaccc

SEQ ID NO: 78986 - DNA, 498 bp, Oryza sativa
tactaagcttgatgggtctgaaatctatcgtgatgtttgcttgtccaaagtgttatctgtgaattggcaaatttgcacaggttggccagaaagaagctctctgtctgctgcagctcaccatcatcttccccgaggtcagcatgttttcgcttgaaaccgcagcgaggaatgcggagaccacctggtgctggagtgagttccactcagctatgtgcaccaaactcactgagataaatcgttgcaagccatagcggattactactggcattgcttcttctatcatcagacaatcagtttctagctaccttacgcataaaaaaagatcagagtgctgttgaattaccttatgtgcatggcgtcatcagcagtccacttggctcaccctagacaaaagaaccttcaattcaagcacaagccataatcttcacttcataataaactcagtaatttcaagcctgaagattaatcgtcataacagtgagatcaatggtggagtca

SEQ ID NO: 78987 - DNA, 482 bp, Oryza sativa
  unsure (1)..(482): unsure at all n locations
agctntatatatctgntccgctaactattatatataagtcaaggtgttgtttgggtttttaagcaattgattggatacaatatcgttgctatttgccacgtaagtgtgcattcttattgaccaatattatggcttaggctgattatatatcttggtcattttccaggcagttggtaaatcctttatgaagttatttactcggattctacaccacatatgtcgtatatntccaggtgtggtgaaaccatgtgtcttttagggacttaagcacatctgttaaagcagtgtgcgcttggtgtatgncacaatacttggaaatttctttattcacaacatacaagcctttttatagctggttngcgtgtgaattnttcaatgatttagtcaactgtaggttgcacgcattatattttacaaagcagtcggcatttaactcgatcatatattcctggattacaccgatatgctatatatgatataag

SEQ ID NO: 78988 - DNA, 480 bp, Oryza sativa
  unsure (1)..(480): unsure at all n locations
actaagcttcctaattgccaatttccttaccgaatcaactactggttattgatagtttccatcggtcgattctaggactcttaagccgatactgactctatggccgatgatgactccagggcttaccaaattttggcgttaacaagtacatagattgggaggctccaattcgaaacaacgaagaacagtgactctaaagatttttcgcaaaatttttaccatgaaaaatctagtatgttacaacttgtcccccatcagtgttactgtagtnttttttcgtctcgctactaaaactgatatctcttgttactgcaggactatttttcccctacattgtaaaactgctatgccacctccatgttcanataaccactgccaagatgttaatggcgaaatttggtagcccagaagttgcatctttctaaatcatatcgctacagagtctaaatcggcgatggagtataagtcaccacagcggat

SEQ ID NO: 78989 - DNA, 451 bp, Oryza sativa
  unsure (1)..(451): unsure at all n locations
agcttagcatgtgtgagttctggntgnccgaagtcaaattcttagggcacgtgatatttgctaaaggagttgctgtggatcccgaaacagtgaccgccgtcaccgattggaagcaacctaagacagtcactcacatccgcagtttcttatgtttggcaggatactaccggagattcatcgagaacttctccaaaatcgctcgacccatgacacagtntgtgaagaaagaagagaagtttgtgtggagcccgcaatgcgagaaggcgttccaaactctcaaagaaaagctggtntcctcgccagtggtaatcttgccggatactcgcaaggatttcatggtgtattgtgatgcttctcgccaaggattggggtgcgtgctcatgcangacggtcatgtggtagcctatgcctcacgccagctacgacctcatgaaggcactacnctacacat

SEQ ID NO: 78990 - DNA, 420 bp, Oryza sativa
  unsure (1)..(420): unsure at all n locations
tgatcatgatccttttccagtaaatacaattaatttctataattatatagtgttgattcngccggagcaagccgaatctactaatggaaaggaagtggtcattggtgagccaaggcctaagatgatggtgccaaagaagccggaggttggtgtttggaaagagaataatggtgaagcttcgacttctaaggctcctatgaaaaccaaagtgacctttgatatgcttttggagaagtatgagaagcaaggtggtgagaggaatcacgacaaatggaaaagaccaagatcacctcctaaggggcgatttggtcattcactaagacggttgcgttcacctccatactttcatccacaagacatgtcattgggttcttatccaatgccgccgncgggttattcttatccttacttcatgtcatg

SEQ ID NO: 78991 - DNA, 475 bp, Oryza sativa
  unsure (1)..(475): unsure at all n locations
agcntatcagtgctaaccctcaagaatctggagtngcgtaattccgggattcttctcagcaatattgagtgctccttcctcacctacttgtcctttaaatgtgtgcacgtgacagccattcccatacaacttcttgagtggttaccttccatctctacaaaagttaaacataatcgagtgtgaatctctcacatttattggagaatcgtattccctcaatggagcattctcattccttactgtcctaatcattgaatgctgccacagaatgccaaccctcgatggcctactgaagaaagaacatctcgccgccattgagattattaaaatttattcttgtactgngttactgtccctgcccggcgaaagggttgggagttgtacttgtctcagtgatttgagaattctcattgtccaatatcaatcgcacagtgattggtttgcatcattttaaaagctatcatgatattgggga

SEQ ID NO: 78992 - DNA, 437 bp, Oryza sativa
  unsure (1)..(437): unsure at all n locations
tgcagcctagtgtgcaaagtagagagcccaatggagagtattctttgtttcccgagaattgctttcctcctagcctttcgtaccacgtggggtcacgtactaagcaagccataggcaagaagagtaagaatcagaagagaaaagcaccgatgcgaactgaagaagaagtacgtaagatgactattaccagcaccgaatggtctccagcagggattactattcctagacgtcaaagaggagataccttccgaggtgcacgacagctgacccagcaccttctaagccatggcggcagagtatctgatagtgaacggtcagatcaagtctcctcggattatgaagatgagtctctccgacatctcggcgaggaagagatggaatcaaaagcatgcncccgttgtggagatattggacacgttgctagcatgtgtctcaca

SEQ ID NO: 78993 - DNA, 353 bp, Oryza sativa
agcttaagctgtattataagaggctctattgtactataatattgtatactataataggaagagagtagagtagaaggagtcgtgagaattccggagttgtcggtaatcttctcctatttcttatattctgtttattattctgaattcaatataatattcttcttgagtaatttagatttatcttgtgagaattacctcttggttagttcctaattagcatacgggattatggttcgctataatcaactaaaatatagtgatggctttggtgagttataaacactaaagtagatattaatcgcttagacgtggtgtttaggtaattattatccaataattgctgcgtatccaca

SEQ ID NO: 78994 - DNA, 431 bp, Oryza sativa
  unsure (1)..(431): unsure at all n locations
tctcttactgaagaggggaaagattgagcaagaatgatttcttcttctgttctcaacaagccacaccggagatgcataattaatgcacggggggtacaaggagataataatataaggggtaagttttgcagtaaacggcatttaaaagtcacttagttgcccaaagctattttgtaaagacgatcctagagctatacaatattattaatcaaggccgtgaaccctcacgaacctgccttaacccaaagcctacgatgattccgaccgaactggcaacccgacctgngttccagctcgtcctaagccaacccaggccaaccatatcatagtttagttgttgatgcatatttaagaattaatacactgacttgggtacattgctaggctngcccatatccgagggctcggctattcgaatagatttactctga

SEQ ID NO: 78995 - DNA, 433 bp, Oryza sativa
  unsure (1)..(433): unsure at all n locations
agcttcatcaagtatatccttacgagtggtcattccaatgaggagcacattattcaatgcctcaacaccatctatctaaaatgcagaaagtntgacgagaacttagtgtatatgcagaaagaanatacgtgagtccaaagttcaaattctaggaaaagatacctttgtaaggagctgatttacaatgctatcatgtacacccgtaccatctctggtagatcctctagactgcacagcacaatcagagtttaattaattcaggagaagttagcagttactataaataaagctgaagcaatgctacaactgatgtaatcaaacatagcacactgaaatatacactggacaaaattgcaaagtgaacttctagaagggggtaaagagtttgatctgaagtacttatgctccntgtattcctaagaacttatgcatg

SEQ ID NO: 78996 - DNA, 448 bp, Oryza sativa
  unsure (1)..(448): unsure at all n locations
ntgtagtctcgccattattattacttgaaaattactttgttatcacgatcacttgtcgagttgaccccctcatatttaaaatctggcttcaccactgtacatgaacagtgtattttcatgcttaggcatgatttagtttccaactttttctttatacttttaacttttctatcacatcaaaacttttctacacacanaacttccaattttccgtcacatcgtttcaatttcaatcaaactttcaatttngatgtgaagttaacacacccttatttcctttaagaagatcatctaacggcttcgatccttgatcctattcagcattgcttcaaatcatttgtgcagaactgctcagctaccactntntgatgaggccttcanacaactcttgtctaaaagaaaaggagcagctgatggagccgccgtcgccggtgcccaacagtacatc

SEQ ID NO: 78997 - DNA, 415 bp, Oryza sativa
  unsure (1)..(415): unsure at all n locations
gcaatcactcgacccggatccttaagtcacctgcagctgcaactttcatgatccttacttgtcccgcggaggggagtcgttctgccgaagaagtgtgaaagggtatcattaacatcaggcccgatcacatccggcctggtgtgctaatgcctgcaatgaatgatagtcgcgtcttatcatgccaccattataaaattatcgcttgtttgcggtacgctatcgccaggttatgccagaatcattaaaaaacatgttgggagtcgtcatggtgcagcacgagacatanatggaaaaccagagctggttgaaaaactcgcacgccgnctgnggcctggtcatgtcgttaatctctgctttatcgtggtattgctttnttccaccttgctcacctggcgtgaagtggtggtgctggaag

SEQ ID NO: 78998 - DNA, 485 bp, Oryza sativa
  unsure (1)..(485): unsure at all n locations
agcttaatcacaaggaataaaatgtgtgcttgctcaaagctangaatttgttattatcccttgttgaatgccaccttagtgtttaacagcattgaatgacaagcacgatatgaatctaagacggaaggaaatggttaatacataagtggagctaaccagtaacaacccagcggtcagaacactgcaaatgtatcaaggtgcaattatgattttntactgacatgaatgaatctctaatgtggacttcaaggcttaaactaattgggtatgaattccccctgaataactctaggaagcagtaaatcaactaactntggtcaatagcaggttgctgactattattcatggtcgggggcctgtagttcattgatgggggaacttcatcaagtccaatttctcgttcaagagtgctcctgaactcccttgagacatcctatatgcggaaaaaagagacacgttacatatgtatcaaagaatcacatcat

SEQ ID NO: 78999 - DNA, 405 bp, Oryza sativa
  unsure (1)..(405): unsure at all n locations
gtattggaaacaagctatagcgcttactccgggcaaatatattgaagcacagaactgtgtgaagattacgaagcgctttgaatttgaataagaccactcttctttttcagaanatgggggtttggttggtgatccattaatcaaataaattaaggtccgacgatcgaatcaagaatttcattatatctctntcctctgccttctattttatattatatttcataaggatcaacgatagggtctagaatagaagtaattaagcgaataacaaggggcaatattaatattgctaatatatcaggaccatcttattaataattctaatgagttatcttggaatctggaatcgnaataaaaatctatattatgctcangggaagtagatatagatagggactcatactc

SEQ ID NO: 79000 - DNA, 458 bp, Oryza sativa
  unsure (1)..(458): unsure at all n locations
tctgcaatttctgaatcaccctgtagaatggcctgttctcccctgtctttatatgtagttccttcccctagaaccgtacttgagaagttcctacctcatacggctcagaaattgctatcttaatttcccttggcttaactgaattcgatttctcaaaaatcgatccaatttcttcttgggttacgcagaagaagttaattacctaagtttcaaaccctaaattttgatcaataatcagtttgatcttttctcccacctgcagaanaatgaagcatagatagacctatatccttcgtccgaaatttctgaaaggtaactatctcggtttcatatatgaagattctatagaatccttgaaaaagaacttttccccataagccaagaaanaagaacttactatctttgggatctgatactacaccgctgcttaatcccttagtggatcggctctattacat

SEQ ID NO: 79001 - DNA, 289 bp, Oryza sativa
agctttctttctaatttaatcagaaccactttccaggataatatgcacctttgggtattcttggtcgctaaccatcttatgttgagattaagaacaagggtcatgtgatgccttagaacatggtggctacatctactatacacttaagtgaccattggtattggaacacactctataggagaatccgacatcacacacttggttgttgatgtcttgcgacacaaaagtccagtgtcatggggaaaggtcgacaagcttttcatgatgagttccatcaaccactgccatc

SEQ ID NO: 79002 - DNA, 451 bp, Oryza sativa
  unsure (1)..(451): unsure at all n locations
tctgccgtttagcacaggtacgcacactaaccaattatatgtgttctatgtgtttgataaaatgcccaaatgcacttgcatcagttgtatgccagtttttgttgttcggaaagtttctgataaaatacctacattcacttcccctgattttaggtctctgttggtggggcttgcatgatgaatcacaaggaaataccaagttaaattttgtattcacttatccacaggcacatggatttatcntgtagcagttataggcagctttggccttganacgagttgctacaggaccctangacgtcattggatatatatacaatcttggacaaaggtagaacaattatttaattattcactataagatctgcatagaannatattggatcgagttggacacaanggattttcctatacggggatgaatctttccctattttattagtttggatca

SEQ ID NO: 79003 - DNA, 441 bp, Oryza sativa
caatcagctcggacccgggatcctctaagtcacctgctgcatcaagcttcttcttttttctactcggtgattgctcattgtgacgcgtagttgaacggaagatcacaagaaggtcgttccaccatggaaagagattggtttgttgacgtgtgcccaagctcaaccactgctgactcaccaactgcagcaagaagagatcactaggtcaaaatatgtgttatgttactcagttcgttggtggtgatggcgtactgtgacatgtacatttgagtattagtctttgtgataatagtaatcaatctgcagcctgcaggcaaggttcctagctaagttcgttaagtgatagcgtcggatatctaaatggcatgagtagttggcttctatctctctggttgtatctgaacaactcacgacatatcactatacactctgaaaattgca

SEQ ID NO: 79004 - DNA, 429 bp, Oryza sativa
ggaagatcgcagcacgcccatggtgttcatagggtatgcagctttctccaaggggtacaaggtgttcgaccctgtgaccgggcgcgtgcaggtgtcacgcgatgtcatcttcgacgaaggcgcgagctgggactggtgcgctgaagcggccgagtccggccttgaacagacggagttttccatcgagtatgtgctgacacaggtgagcggtggtggtcgcggcgcacaggaggaaaactcatcgccaagctcgcgacgcgctgcatcgaccacgcctgaggagccgcgcacgccgtcgccaagcttgtgaccacgagcgtctttgcatgggacaagtccagtgttcatttcgcctccgtcgaggggagacgagcaccttgatgctgatcacgatgactgcccgccaaggtatcgccccctatgggatct

SEQ ID NO: 79005 - DNA, 308 bp, Oryza sativa
aagctggctaatattatcggcgtatccaaatatgtcaatcatagagtggagcaagaaaacagactcgaaagattgaaatacttctagcataatttgagctcctatagcctcaaccccttgtcactctttgccaattctgaagagaactttcttgagtgatggatatagagacatcacatgcattacatgtttgtagtgagacccccaacgagtatcacctgccaccatattttaaagtagtggcgagtacaaaatatcacatgatcgagtaccacatataacatgtctaatgaaacatgatcctcacc

SEQ ID NO: 79006 - DNA, 488 bp, Oryza sativa
  unsure (1)..(488): unsure at all n locations
tcacgaattantagtctctatcttgtaatgtcattgctctttcttgatccaacccaatagctaatacaatatacttatactatatactttcttgggctaaaataaacaaatatagtacgatcgagacagagacataaacgaatagtaatcatttatgggttgacgctgctggttaggtaaaatacagttttagaatgaacaagaatggattaatttagtggttcacggtttgtcctatatggggagacaatcatgaggtgataagtcccatatagctcgtgttatgttgttatctacaaccatatatagcgggctgtagtgctactgttgatgtacgtgtcgtcctctcttaaacatacccctgccctaccatgtccatgattccaaacaagggaatatatgtattgcaaatcgtatatgcagcggaaacttgtaactattattgatcgagaatggacgccgagttcgttacgcactatagtaaaatt

SEQ ID NO: 79007 - DNA, 297 bp, Oryza sativa
cgaatgctgccctgctaaaccaaaagaaggtgcctcctcttgcatatacccatggaccattacggcatagcgttcttgctctctacaatcgatacaaaggggacattctcttctggcatttggagctcatcgacctgtgtggcaaatgctcgatccaacacatactgattttggcttgacttccaactaatggtagctgcaacttagcagcatgcttggaatggaccaaaggtgtgccctggataactctcttgaggccagggtggattgagctgaaacttgataacttgtgtatac

SEQ ID NO: 79008 - DNA, 346 bp, Oryza sativa
agtcttttataactattaagccaggttatgttatagaactatctatgaaaagcatggtttagtcatatgcttagttggagaagcaagctttgttgtatagtgataggtcgggtaaacaacctgctacattgatgggcagcatagctacacatagtcgtgaagactaatacggatagataccagcacaagtttcagatcaactcagagcaaagtaaatacagaagtcacgtcctatagttattatcgaacttcattacctccgcatcgccaacactggcagtatgatggacaatggactcatcatcatcttcaccatcctcttcagtttcttcacgtgcagacaatg

SEQ ID NO: 79009 - DNA, 447 bp, Oryza sativa
  unsure (1)..(447): unsure at all n locations
aaactcagcctggccatacaactaactgctcagctctgttgtttactttctactaccaagagccttgatgtctcgcgtcatggtgatcgacagggggcggatgcgacatgttccatctatgagagctcgacgtcttgtgcaccttcaatatcaccattgggaccttctcaaatgccatttacatttatcccaaaacctccttcacagttcatctagaattgtcatgaacttgatcaggcacaaccgtacagtgcaatgtgttacaaacaaccttcatctgaattctgcattaccaatcagatcatatcgatccactatatgccctgtttgtagagcttcaaactccaactctaacgggagatagctcctattgcaactgacgtgggtgtgaaagtgattggctagactgttaactccacaccatcacatncattggctgcatttcgt

SEQ ID NO: 79010 - DNA, 401 bp, Oryza sativa
  unsure (1)..(401): unsure at all n locations
agcttgtgtcattctttatcagcngntcctacgcacaaatcacatgtaccgtatgatgaaagcggagttcgatggtactgaagagactgatcctgcaccgaaacctacatcgggagaaaaagtgtgtgcaatgacagataaaattgtttgcgaggttggaaatatgactataaaaccatcagaggggacaaagctgatgaaatccgagaagaatatgaaacaaggggatagttagaagcaagatgatagttctgaagcagatgataaactccctctcccattcaagaagcattccatattttttaagtacctcccgtactggatagatctggaggttcggcatgtcataaacgtcatgcttctagagtagaactgtgctgacaacactaattgaacattgt

SEQ ID NO: 79011 - DNA, 491 bp, Oryza sativa
  unsure (1)..(491): unsure at all n locations
tggtttanaccatatagagctnttgagagtntatatacattgttatgaagaaagcacatgacaagccaagatcacaaatttgagcaaccgaaagcaaatagaaatgtagagatttaacaagagaaatattatcaattgacaaatcattggagatagcaattttacctaacccaattacctttcctttgctattgtctccaaatgtcactntctcttgttctttccctcctactttaaatatggtgaacatagccctatcactggtcatgtgttgagtgcatccactatcaagcacccaatggctcccaccagtgcggtagttcacctagaaaagaagatcaagctctnttatgtacccaaactggtttgggtccttggaggttagagaccatagctatgggcacccaaatgacattctttntaccaccgagtgtangggaacccacatatctagcaacaatgctaccatcatgagccgtcctaagtatata

SEQ ID NO: 79012 - DNA, 390 bp, Oryza sativa
  unsure (1)..(390): unsure at all n locations
gcttgttacgtgttataaagnntgatacgtatgtataaatcctttgtatacgtcatatataaagnttgtatatgtgtatagaaactntatatacacgttcgtatctaaggtttgtatactcgtatacgtatacacatgatgtgtnntttttaattattttaatacgtacatctacaaagtttgcatatttcatatacaaagtttgcacacatcatatacaaagtttatacacattgtatacaaagtttatatatgtgtatatttttntatacataaaaatatatattcgttagtagtagtagtatagtagtcctagtagtaatagtagtatagtagtactactactagtagtaaatacctagagtactagtagtactagtgtactatact

SEQ ID NO: 79013 - DNA, 425 bp, Oryza sativa
  unsure (1)..(425): unsure at all n locations
actcagctttctgtcagctatggcgacagcaaagcgctcgatctctctccgagtgtgagtggcgacgactgggagccaaacccacgccgtcgagctcgtactcccccgccttctccacatcaaagtcctaagcagggggaggcgctcgagagggttgaaagatccgcggcttcaccaatcgcgggcgatggaggagaacggcgagatggngagcgtcgcctcctcgtctacggcgacggcagcacgccccagggcgcacttcatgctgctggcgcgctcctacgtcacccgcccgtcgtccctgacccggagtctccagcccagcgatggctggacgacgtggccaacttggtcatgacggcacagcagcgcctgtgtactggtggacggtcctccaccccagggccaccgggcgccgtaccacc

SEQ ID NO: 79014 - DNA, 390 bp, Oryza sativa
  unsure (1)..(390): unsure at all n locations
catactagctttgctatagaagaagccattatgatgtggttgactgactggtgcttgaggggccaaccttttactctaacattggataatgcttgtgataacacggctgttgggacgaaatgtgaaaatcataagaattagttgtatctgaggttacatttcatttacgtctgncacacatctcaattattggttcaagatggaatgacgttaattcgtggggcaatacataagatacatgagctcttgaatacatataaaatcagcctacgtttcaagcgtcaattcaatgccacagatcatgccttagtcaaattttgctaactgttgatgtcctaacccgttgacacactttcaaatggtttagaagcttggcataagctgccttat

SEQ ID NO: 79015 - DNA, 326 bp, Oryza sativa
atctctacaaaatgatgtgccggaccaacagagatgtgagttatcaactacaggttcctacacatagcaagtaacctagaatgcttactttcttggatccatcaaatttgccccttggaggagtatttggataaattgggctcctctacacttgcagttttcctatggttggcataaacaatcgttgttggacagggaccgacttggcaacatggactagcacacctggcaacctgtcactatgtgatcaaaaggacggtaccatccatacttgtgttaagtgtcttctctcggaagatcataccttgattttttgaactgggaat

SEQ ID NO: 79016 - DNA, 337 bp, Oryza sativa
cagctctgttctgtcgtggggtcttgtaatgaccttggacaccggccattgacaagaacaattgaattaatcaaggaacaaatgaacgcgaagtttcagaagtgatcctaccaacactctattatcaacaccttgccgccagaaaatggccatgttagtaggctaaggtggcggagaaaggatcccatctctctctctcttcctctctaacccaactatgaagatggatttggagccgtgcggatgtcgagctcctacatgatggatgaccgaccacaacgtgctgtcgtgaaagcctcgcactgtaagtgtcaattatgggtggtactatttcagc

SEQ ID NO: 79017 - DNA, 406 bp, Oryza sativa
  unsure (1)..(406): unsure at all n locations
caattcagctcgacccgggatccttgagtcacctgacgcatgcaacttcngtcttttatattatatcttcggctaaatataaagctaataattctatagaaaacccaataatatttatatgctatagaggagcaatgaatatcaatcttctgggcgcgttcattttctagtacgtagcgaaatcatggtgctatgacatgatatagcgctcagatcgctgcaaaaggtcatcaatcttctgctgcactgtccagtacaatccatagtcttcggcaagggtcttggcttgaggagagtctccatctcctgtagtcatggtgtgagtagcagctgatgatgtaggggtctgttccatgggaaatgcaatcgcggcaccactggaaaacacattccctaatggatcacc

SEQ ID NO: 79018 - DNA, 488 bp, Oryza sativa
  unsure (1)..(488): unsure at all n locations
tcggaggatccctacgcttactaccaggagggtgatggttactatggcgctcagtaggtcttagttaccgtcgttgcctgtggcaatggcgtgccgctgccttgactccgctgccttacctacttctgtttttggaatgtattctagaccgctcggtccgatgatttgagactatgcctgcgggcttatgatgtaataattcgcactagactctcgtgtatgtgcatttggtatttcagctatgaactcgtgtataccagactacttgatccagggaaatggtactgattacacgatagattcctgttataaaaacaggggtccacagagttggtatcagagccatacgactgtaggataagaccacaaggcgccccaccccttttctaagattggccaagggagaaatccnatntagtaatactttcacaaattaaaactctatggttacaaactctgacgatttcatcttactttactacttcttc

SEQ ID NO: 79019 - DNA, 421 bp, Oryza sativa
  unsure (1)..(421): unsure at all n locations
agcttatccttcttatacataaaagggaaagaaaaagggtcttactccaaggcaatcttgcatactccaaattccttccctcacaaaagaaaaggagaagaaagaaactgttgaagctgaaactgaagacaagtctgcctagccagcctccattcaaaggcggacaacgcaatcatcagtatataataatattaatataatgtactggtgctatgaaatgatgaaatcaatgcagctcggttagttgcatgtatggccagagtaacctatgtccattgcatatatgttcagacgaaccattcaacatactgacgcaggcagctcccataattccaaacttttgatgattcatgaaagggcatactccgtaaggaacataaatganggcatatggttacangggcagcagcaatattaatta

SEQ ID NO: 79020 - DNA, 426 bp, Oryza sativa
  unsure (1)..(426): unsure at all n locations
atttgagaggatcagtgatgacnggaagctactgagtttgttgtactgcaagcctttaccagtggaagtcgaattcttcttgacgaaagataatgggaggtctcctgttgacgcctgcccacttgagccattacttgaaattaaactcttcatctgtgtaaaggttgcaggaagctccccactgaatgagttgttggacagatcgatgtataaaagactgtcgaggttgcctaaccatggcgggatcttcccatgcaaattgttccatgaaatatccagcacactgaggctcttcaagctctgcagccaaggtggaaccgtgcccaagagtgcacagttcgccaggacaagaacctgcattctcttgaacccttctatgccgttcaattgcatggtttcaccaccaccgaagttattggtgagcac

SEQ ID NO: 79021 - DNA, 343 bp, Oryza sativa
  unsure (1)..(343): unsure at all n locations
agcttcagaaatctttgagtctattggcaagcatgagaaagctgctacttgctatatgaaattaggtgactacaaaaaagcaggtatgatgactgtcttaaattgttatatggttgtgtattacattctttatgtcttcacctttccatcttgttttaacaaatggcaagtttctcagaaagggtttccccacaagtaaatgattctttctcagcgaatntctgcttccagaatttttttgtaacatttttttcctggtagtatcatactcccttcatttccaaatgatctacatanttcatatgtacaccaagaccaagaagagctaataactctctcatac

SEQ ID NO: 79022 - DNA, 305 bp, Oryza sativa
aacatgtattactcaccattaagccctgagcttaaacaaattgagtctagaccagacgcaagattgcgaccccgccgttcacatgatagacggagtacgcttgagccctgggagtacagcgcctatgactcttgaggccaggccatcacaatttaccccaactaactaccaaaagcaatacaactaatccactgggatcaaggttctggtcacctgcaagcggaggcattcatggatccccattaagaaaaactccatccagttacagcaagaagaggggttagcaatgccacctcatgaaatcc

SEQ ID NO: 79023 - DNA, 310 bp, Oryza sativa
agcttgcagtacttaattctgtctcggatactgttaactgctaccttagcagtattgaatgcaccatgtatctctctaatcatggccttacggtctttataatttcaggaggatgaccctgttacgtctgttacaaagctcttcatgacaccaccttcaaagaagttgaggatacatcgggcagagaagggctgataagtcagaactgtattggccagagctgggtgttcaggcgagtctcttccaatctgtctaaacatgtttgggacactggtcgcgagctctccacctgtggccattagtactgtga

SEQ ID NO: 79024 - DNA, 454 bp, Oryza sativa
  unsure (1)..(454): unsure at all n locations
cttgactcggcaatagctacttactatcacttacacaaagtatcttcctagcagcctantacaatatgctaatgcctaatgcccactttgcaactagactgaggagtgccctaaaaaacgtgtatcatctgagacactgtgccatcagagttgatgatacatatgagacttgtatgggcctccgtcctatcaccaggaaaacccgcgtatgacagcgttcactctccaaagactattaggacgagacatcgtgggttctatctagacatgccctgagaagaggatctctcaactcgtatctaacgcaccgagtctttgtattaacatgtggacctgacgatacatcacgcctatatgtcattgacaaaagcaccgagcagtgactgcatatgatactaatccctgagcagaggggctctaggcgctgacaatggcagcagtgcatagcatatac

SEQ ID NO: 79025 - DNA, 329 bp, Oryza sativa
  unsure (1)..(329): unsure at all n locations
agcttgataattttatctcttacagcattngngtacctctgcaagaagttcctgcactagtttccctctccttttcaggccaaaatgctttcaccatctgcttaatcttttatgttattagtcacgaactgaaagttgtggtgttgtttcttgcagagaagacagagagaggagtacatgagatggcatgctgtgatgaagctaagtcgttggcttcaatggaggaagacgtaagtgtgaccctgagcctgtagagttattgtgtctctcttttctgtctaatggacaatgagaacactcttgccttctgaattaatccccaactgtgc

SEQ ID NO: 79026 - DNA, 436 bp, Oryza sativa
  unsure (1)..(436): unsure at all n locations
tgcagcagcagcgaggccagctggtcgatagnggttagcaactttttggttaagacatctgagttggattaaagaaaagtgtggtcatattgtggatttagccgcangttgtccgggtctgaggactactagtaatgtttttaagattctttaagcatgttcgaatgtatggttgccagctgctaaaatggatatgtttgactgaccacacgtggttttggtgtcatgtgttattgacccatgtgctcatgtctgcaagtccacaactccacatatgagtacaagaatagtagtaccagtatgaaacttttccaatagtgcatttaaaaacttaagatttggtgcaattattttatttagtctttacattcatatgcagctgtttagttttatgccgctatgtggatatcatatnttggcacgtctcgttataagt

SEQ ID NO: 79027 - DNA, 313 bp, Oryza sativa
  unsure (1)..(313): unsure at all n locations
agctngtgatatggaaatcgttgaatataaacggacggtggagatacccgggacgtgacacgtcaccattattctgttgtcaactgcatgccgcaacaaactgagtaaaccctaccaccccccaacctctcccccctataacctgtgagcaccaactacaaaaacccatggtgagatcgatcgatatcgatcgattgattgctatagctaggtcaaatcgatcgatctcgatcgatcgggtggtcgatccgatcagcagccatggagtaccaccaccggccgcattcgccgccgccgtctgacgacgacgtcg

SEQ ID NO: 79028 - DNA, 486 bp, Oryza sativa
  unsure (1)..(486): unsure at all n locations
actaagctacaagaccctgaggtcaccaaagtacacgtctaccagtctagtactggcagtggcattgcgcagtgatactatatatggatattcagttgggccttggcattaacacagaaaagcagactcataaaatatgatcacgtgatccttactgcaagcatattgcagtactctatatnttgtgaaacaaataacatgctgtataattagaataccagtaaagagctgcttaggctttattttgtactttgaaggcactttgtatagccttcacttcagtaagtgctgttctccataccacaatagcacaagaagaatggttactataaaaaaactaatggaatggattgcacaagtaataatgacaacatatccacatatctattgaagctattatagacaaaaaaaaaacattnttactacgcagtagccctatagttcctaaaccaaggcagaaggagaacaacagtcttcagatagtac

SEQ ID NO: 79029 - DNA, 412 bp, Oryza sativa
agctttgatcttgttctatatacatgcaatctgatacgaggatatactccctccgtccctaaatatatgacgccattgactatttaaaatatgtttgaccattcgttttattcaaaaacttttgtgaaatatgtaaaactatatttatacacatacgtatatttaacaatgaatcaaatgatacgaaaataataataattacttaaatgttttaatattacgaacgatcgaacatgtttaaaaaagtcaataacgtcaaatatatatggatggatggagtttaagactttagccttagacttttttctcaatgaatgtgtgcaagcacaatccgtggtgacaagtgctctggaaatgtgtaagttgccataatcagggttgtcgctttgatgcctaaagcaagatttaaagg

SEQ ID NO: 79030 - DNA, 433 bp, Oryza sativa
  unsure (1)..(433): unsure at all n locations
ctaagctaagagacgttatgcaactttgnatatggatgaaatttttaatacttgatattgtgtctcatatcctagttgggcaatttttatgctcggtgtgttaaatataattgaactacacgttntattganggctagaatgtnataatcggatgtagctctggtgagcaaaggccggatatatctatttcattattaaaaaaatacaaactatcacaagtttttttttataaactttctgatataactataatgtaatggagtgcatgtacactgtaactcgtatgtattttatatgtagctgaaattaaactataataatttgaagtttgatggtacatagatcgtcacaaactcaagggcggtgaggtgaatacatcagctgacttgccatttattttcctctactgctacatgatcttacgattctacg

SEQ ID NO: 79031 - DNA, 434 bp, Oryza sativa
  unsure (1)..(434): unsure at all n locations
tagtatagccgactactaactctaattcatctatagctaatctaataactcattcatacaataggtacatactacactattaataccttgtcccacttatcatacacacagcgtgtcttagagtccgtgctacaactggctataaatntgtagtccgctgctcttctctctctttatttatctccttaaaatatgtttgcagctggcttatagtttgctattggacctgctcttacgatggtttaatcattctcagatctatgaactggttcttgatcattngatcatcatgtgcttgaaatttacacattnggtcctgagtctgtattaaatgtgtaaaatttcaagtgataaggtcttctccagtgtcatgatcagtttgctgatcgtcacattatcaattagtcccctttaattaatccaagcgtgaagca

SEQ ID NO: 79032 - DNA, 353 bp, Oryza sativa
  unsure (1)..(353): unsure at all n locations
gggcgaggatatagcaaactgtgtgtctaagttcccttcggtcatcccagctttaaacaacaagttccagttcatgctcccaatttgatccaaattaatttttccattctactcatttatggtcattacaataataacaattntggtaggctggattgtgcctttcacgtgctctactacatgcgaaactgggatggaactcgccttgtgaaccacccaaaatccgtgagttttctgtacacactatgttcaacttaagtttcattgaaggagcttcctttataataaataatattctatattaacaacaggatcaacgagatcttcgaaggaatttctgtcaacttattgtc

SEQ ID NO: 79033 - DNA, 363 bp, Oryza sativa
aaccgccgagaactatgtacgtcacagcggttgggttgtgcgggataacgtgcctgtcagtaccgtgtactggcgaagaacaagggcacgtggagatcatgagagctttgtcccacattcggagaaagagatgctgtggaccacaatgctcgagacattcacccttcctgcgggtacagaggacaaagtgtaaaggtggactctgaagaaaatggcagaacagtttcagagcttcaagggagatctgtaccagatgtatatactgaaggggcatacaccgaacttcgacacattctcaaagctaagggatcactgggacgagttcgttgcatataagacaagtgaacaatggcatgcgatgat

SEQ ID NO: 79034 - DNA, 381 bp, Oryza sativa
  unsure (1)..(381): unsure at all n locations
tgttatgttctatggatacactccaccagacccaccctgcctactcgccaaagatcccaagagcgaggacagcagcggaaaagaagaagcgcaactccagcgatgacggtcaatggagagcctctactcttcgcgccagcaatctatcaaagggatgcaaggtgtangggcggtgcttatgaagatttcaacgtacttgcgattgaaatctttgaagaagacgatggatcactctacttccccgatgatgaaccaccggaagttgatcaaatccagcttatgtccggccgtcagatagctgatgtatgcccttccgcttatcctaaaagtcctagaagcaaggatgtagcttcagatgaaaggactgacccctcctcccac

SEQ ID NO: 79035 - DNA, 59 bp, Oryza sativa
cggtcttagcactcgctcttttttttttaaccgaaaaattttctattaaaatgtttaaa

SEQ ID NO: 79036 - DNA, 415 bp, Oryza sativa
  unsure (1)..(415): unsure at all n locations
attccccctgttggaagagacatacctaatcaatgagactacaacaacagaaaatattgtaatcattgctcatggaaaaaaggaactgtgcacaaccttctagttcttaaacctaatgatgcactgtgcctcttgagtgagaaagtaatataggcgtgctccatttatcttggtttgatattctttattcatttgagtaatccaatcaagatgatattngtgcagacagaaatagcatacacatgatgcatatacaatttaatctgttctcacaacaatagcgggttgtgtaaataacaaccatagcgatgcactttctaacatgacctgcattggattgatgttagatgagaccctgctctcgcatgtgacggtggtcttcattccctagtcttaatacgtaagacatcattct

SEQ ID NO: 79037 - DNA, 283 bp, Oryza sativa
agctacacatgcttagtatgcccattatcatccactaaggagatgccacatcatcattcactaatcaagaagatgccacatcatcatctactaacaatcatgacatttaaacatcatgcaaacatgctatatctgtataatatgtataattgaagagcttttcaaatacaaatatgttaaattatcatctagcataattcacaataatatgtcaatgtatatctgtattatgttgtatgatatcctatatacttatataggtcatcctcactttactttatta

SEQ ID NO: 79038 - DNA, 416 bp, Oryza sativa
  unsure (1)..(416): unsure at all n locations
ctaagctcttatattcatgataactcaatgtataacatctgcagctagctttgttaatgttaacacactaatcatctcaccactttttctttcgctggacaatgctagaaactccaaaagcactatctatttcaacataggcagatggtatatggggctcaaaaataattgcatcacacttaccataaaatactaatacctgccacataatggtgagcacccttggtggcangaagcagaaactggatgcgcccttcagccataattaatctttgctcattttgcaccagttaccactaatgcacacgtgagacngtgagacatctaaaggctttttcgtgtactacaattattgccaagctaacagttgctatgctagtaaaacacagcccaaataaaccaacgagcacagtgaa

SEQ ID NO: 79039 - DNA, 126 bp, Oryza sativa
agctgaattatcttttccactagaaaagaagaagtcgttatacgaactggacttaacgaacgaaaatagttaggttaagaagggactcaccagtcctgatagaccacggcatactttggtctaaat

SEQ ID NO: 79040 - DNA, 447 bp, Oryza sativa
  unsure (1)..(447): unsure at all n locations
aataagctaagttatgcgtttgttatagatcagaatgaacacataanattaacggagacctagagtatgcaagaacaaactgaaatctcgaagatatagaaggaatataatcgagtaaaacttgaaaattaattttgagaggcacaaatagaatgttctcgttacctttcctcccctcttctttttttcttcaattttcacctttaatttctccagccttttttcatatgtattggaccatcttttgcattctaaaattgtttcgttgaaaaagaatattctcctccctttttcactggaggcgcttaacttgcgcaaacgcgtgagcagagtatatatggttgattcgatccatgccaatggaaatgtggctatnanagaaaatcaattacaattcgtctattcgtaagcacaccaatcaaatnttacgaaagtagaaccatgcca

SEQ ID NO: 79041 - DNA, 351 bp, Oryza sativa
tccttgagctcgcgcagccggatggccgcgtaatgctgggcgagcaactcttcgaccattctaggagcccatcggatgtagcgctggaggatgccagcgccgtggccccaactggcgtggtggaccgctgggtcgccgcgctgcaggtaggtgtccatgcaggtgctgcagtcctgcgcgagcttcccggacctacttaattcaagtccggacctgcttgcctggcttgccaccgggtggctccgtctcggtcatgtgagccaggaagctcctcatgctctccaacttctccttgatgaactggacgtgcattttcactcggtctaccaactgcgcctcatcgtggatgag

SEQ ID NO: 79042 - DNA, 291 bp, Oryza sativa
gatttcaaattatttcctgaagtcaagctgtctggagaacatcttgtaacggtattcaaatacaaaaatggcgattatgttcgggagatagccaaaattatacattactctctcaaaagaagagggtggtttatataatttacgtggattggattttaaggtgtgcttctttttctgacagaacttcagtaactatgatattcaatatgtgaactgcggaaccgtcattgtttgatgttgatactccgtgtatttttactgcgcctgctttctactagagtaatgaaaaat

SEQ ID NO: 79043 - DNA, 350 bp, Oryza sativa
  unsure (1)..(350): unsure at all n locations
tgtttgtgttctggcatgccgangaacggaaagtcgatatgtatgctgaggcacccagcagattcagtacagtggaggacaattgataggatttaccatgaattctcaaatgacccaagatacatgtgtttcgcaatgtgtatggacagtattaatcctcttggtgatttgagcagtcgtcacagtacatggccagttctgcttgttaactataaccttcctctctggttgngtttcaaaagaaagtatattatgcttgccatgctcattcaaggaccgagacaatctgtcatcgatatcgatgtggtccttgtaccgataattcatgactttcgaaggctatggaatga

SEQ ID NO: 79044 - DNA, 445 bp, Oryza sativa
  unsure (1)..(445): unsure at all n locations
tagacactcaagctcctactgcacctctcgccactactccctgtgtcatcggtttgatgttctgtctcaagcatgagtcttgaagttggcttgggacactcactagcgaaatgaccgagcccaccacgagaaaacctactgngttttagggctgtttgactggtggcgaaaccaagtgaatgaactacttagctcatgttcttcatagtttcgggatactatccacccctcattgagtatgatctgagaacctgattacattagcgcgatagtatgtagggatacattactccgactaggattccggcgtggattggtgggaaacaacactttcatcagacagaagagagatccattccttctcttctataggacatgactgatgttgtgttacccctcgaatttctatccaaatatccaaacgcttacattgtgtgtgaaccct

SEQ ID NO: 79045 - DNA, 246 bp, Oryza sativa
  unsure (1)..(246): unsure at all n locations
acactatgaaactcagcttcatggtcgttgaccggaggcatggaacatgcgtatgccagctgatgtaccactgcacgcggactnggcattgacattcaccccactatcgttcaccttcttctcagctagtgggcaatgaaaaaaaaggcaagctctagctagttgctggcgcaatttggatagagaaaaggtgctgaggataagccgcgcacttcagatggtggatgtgcttatgctatgtggcat

SEQ ID NO: 79046 - DNA, 316 bp, Oryza sativa
  unsure (1)..(316): unsure at all n locations
tagcttgctgcttatctctaaccctgtaatatcataactagctaattaatcgacatctccaaaatgatgctcaaacagaacaatgcaagattggaaacgaggagcacaacgagtggttcttcttcagccacaaagacaagaagtacccgacgggcacactcaccaacatggcgaccactgccggctattggaaggccaccgggagggacaagccgatctatgttcagaactgccttgttgggatgaagaacacgttggttntctacacgggccgggcttccaacggacagaaatccgactggatcatgcacgagta

SEQ ID NO: 79047 - DNA, 463 bp, Oryza sativa
  unsure (1)..(463): unsure at all n locations
tncttttcttctcgctggtgctntaattaaataataagaaaatcatacaaataatcacagcaccatgattgtagattcgggtttatcacaanaatgggacaagtgctatgtgctttactgttagaagtataagtcgtgtccctacacgaaatatttcatgatcttttcgctatgaactgataatgaattagtcccatcattttgccgtanaacaattatatatgtcttctgagcggtgtaaaagctgatgatgaaaaataaactacgataaaaacacatgaaaaaaactctacaattaaaaattaaaatttaaaatttgcatgtggctgataagctaaagtgcaaatgatgaagctcatgatcccttaaagaatcaatgtccaaggattagtgtgagtgatgttggattggtgggtgatcccaacgggcatcttgtgtttgttgaatnttctgagctcacaaa

SEQ ID NO: 79048 - DNA, 341 bp, Oryza sativa
  unsure (1)..(341): unsure at all n locations
cgaaccggaccttaagcaccgcagcaagcagcncaattttgtgtataagcaaggcatcaaagactgagcaagcaatgaagcaaaccacaacacaactgtctaataccgcaacctaatttgagctctaggaggctacaagacgagccaacaacccacgcgcgtcaatgactacaaggtgtgccacagaagccaaacgtggaagacgagacagagggcaattgaacaccgatcaacaaaaaaatcgaatacaaagacatgcgccaagacaaactgtgcagagaagaactcggacaacaaagcaaagtgcagcgcggaccgcggaggagactacgaccaccaca

SEQ ID NO: 79049 - DNA, 379 bp, Oryza sativa
  unsure (1)..(379): unsure at all n locations
agctcggtattgtcaatttatggagccgggctgnncatgccgaagctccaacctagcacatagtgttttccactgactgttcctgttgaagatgagaagccaatatatgccgagtcagtgagcactgttgatagattgtaggtagtagaaagcagtggcttcacaggtatttccacattgaggggggccatggtcacattgatctgtgtgatttctctatcatagttgacccaaacttgcatcgccttctggctaatgagtgtcaaattcttaaagtcaccactcttatcattcgaaaagccagcatcacgagatttcatggagtaaagactgttgatattgatgccaatgtgggtattactgatgtcttgtatgtcat

SEQ ID NO: 79050 - DNA, 319 bp, Oryza sativa
  unsure (1)..(319): unsure at all n locations
agttttttgttctttgcattanncacngattgtggaaacataacatatatataatcctgactatatcctatctgaaacaactgtctaatgattgacaattgaaacaaatcatatataattaatgaaaagtgcatggaactgagattcatggcctcctaatatcatattgncatatgctaatgatgcttataccttngtaactgaaattcacaaacagaattaaactagtgactaactaaattttaacccaaacatacatgtatgaattaaaagttgcaacgaacttaattaggctgatgatgatcgcctaaccacctca

SEQ ID NO: 79051 - DNA, 395 bp, Oryza sativa
ctttttaactttgggtcgaaaggagacttgcgtctcgattcgacttaagagatgcttttcaacaactcaaatggtaatgtaccgaccccccgggtcatatcattacttatcggctcccaaagccatttcacttgattaggcggctcccagagcctttttcattttctcggactcccagagtccagctgcccagcagcaacaatccgctttcactcgggaagcctagtctatgatgcccatagacatttcgaatcacacagattcgtttctgaccactcaggtcatccatctgccacataggctgattctggttacgattcccaaaccacaacaacttttcacaaagcacaggcaaacaaatctacgcaacgggaaccacctcacatccacccatg

SEQ ID NO: 79052 - DNA, 284 bp, Oryza sativa
caaaagaggcatggtgaaaggcacactgaagatgcacacacactgacttcatttatacagcagcactaagcatgcgttcctgtgatttatcaccgaccaaacatttgaataacagcggcaagcaatgccagcgaaccaccatctaagcagactctaataataagagcttcctctaccaggcattaggtaaataaccccataggcatcaatacctatacaggttactgacaaatactgtatggagaacacatgacaacacaaaatacacatcagggtctctcatg

SEQ ID NO: 79053 - DNA, 291 bp, Oryza sativa
  unsure (1)..(291): unsure at all n locations
accaanatactcagcttctttaaccactatctctagccgtcggaccataaatattttttctttgtgtgtacaacatgccatttattgtgcactactataaatatgaacacccattttataatttagaccactaatccataggtgatgcctaaagatttgtctatttagttttaaagtatttagggatgccagtgcatacttggaggcctcggtgcctctaggcgaattcgtgaacaattataaagcttggcgccaggaaaatacatagttgagcttgccatcgatttttta

SEQ ID NO: 79054 - DNA, 368 bp, Oryza sativa
  unsure (1)..(368): unsure at all n locations
agcttcgtactaatttcttcgtgtgtacagtagggctgaggggaaaaaacatatggcgagatttgtgggaccgatatggcgatcgaacatgcaactggctagacattgttacacaggaaagtatgattatagaaatggacgtttcagatntgtntacgtcaccataatgtaaagtttctctcaaatataaccgtgagatctaagacgtttantttttaatccaattataaatttcagagttgcactacanttttttttccttatgattagcctactacacatacactatgggtagtcgtcatcggacattgggtgccggtgggactgtgggaggcacagtcccgtagcctgtatgaaccataccgaca

SEQ ID NO: 79055 - DNA, 476 bp, Oryza sativa
  unsure (1)..(476): unsure at all n locations
tcttatgataattngcctcgtntggtagccaccattgcccagaggtataataatacgtactatgacctacatacatttacatcggntgatgatcgaacaaagagtgtgctgcaaagagcctttttctcattgggtgcttgcatcaatgcttttgtgcattgtcgacctgttctatgcatagatggaacttttatgacaggtaaataccgaggtcagatattgacagcaattgggtgtgatgggaacaaccaggttctacctatggcttttgcatttgtagagagtgagaacattganagctggtactggttcttagagagagtgcacattgcagtggtgcgtatgaggcccaacgttngccttatacatgatcgtcatgcgnggtatgtgcgggctattgactactngcagaacgggtgggatgagaanggacttccagctaagtggcctgatgttcggagtcggtggtgcatgcg

SEQ ID NO: 79056 - DNA, 193 bp, Oryza sativa
gctagctttattttgcctgatggtgatcaattttgcaaggaaaatgagctatgagaaggtagagagagcaggacaagaagctggcagggggtgcaccggcaacagaaggagaagcatgggctaggactccataagcaagtgcttgggtgagaagtattgctctccaacgtgggtgcatgctagcattctccta

SEQ ID NO: 79057 - DNA, 469 bp, Oryza sativa
actccgtcccgggatcctataagtcaactgcagcaagcaactgaattcgaattttattttgtttgagtgcacaatatgcgcattttatgaaactaatgagacttaataatgagtgcataaaattttgactaaaattttgagaataaaacatatgtaataaatcaatcgtttttccttaacattgtcataggacagtagattctttatatcgggagtatttataaaaaagaatatcacgagcatggttagtctcctttatgaatgctcctcattttttataacttttataaaataatatcatacaaaattatttattataatatctaagattaatgtttttcatatataatgtatcgaacacaaactctaaactatgatcatcaaagggtaaaatgggatttttataaaaataaactataaatgacggggatgtatgaaggataaaattaattcgataacatcaagggat

SEQ ID NO: 79058 - DNA, 113 bp, Oryza sativa
gaccctcatcactctgcattgcctggcgtttattatttacgcgcaaaaaacgcacaagccttatgcaccaatcgagtcggcaccgggtgccctttttttctgtaagagtttgg

SEQ ID NO: 79059 - DNA, 362 bp, Oryza sativa
  unsure (1)..(362): unsure at all n locations
agtttgtatgttgtgaataaagaaatnatcaaagtattgggcatacgccatgcgcatactgctttaacagatgtgcttaagtccctaaaagacgcatggtttcaccacaaccggaaatatacgacatatgtggtgtaaaatccgagtaaataaactcataaaggatttaccaaccacttggaaaatgaccaaaatatataatcagcctaagccataatattggtcaatattattttatacttacgtggccaaaaagcaacgatattgtatccaatcaattgctgtatgaacccaaacaacgcctttacttatataagaaagtcaggcgggagctatataaagcattacttgtttgcaccttt

SEQ ID NO: 79060 - DNA, 393 bp, Oryza sativa
agctttcacaggttgcggtgaaaagggggaagaaaggcgtcgcacctcgttggaagcagctgccactggcatggagacagcgttctcgtctcctagggcaagtgccaacctcatatccttctgctggtgtttcaggggaaatgcagggttgtagctgccttgcagcatcgagggccctttcagcttgaacattggattcgcgatggcgccaaggtcctgaaagacaatgatttactcggtgttatttgatgctcaattgtgaaggaggtggctccggtagaatgaaattaaccatgtgccataccaggacatcaagaagtgtctgggggctcaaaccactgttatcagccagagagagtccctcagacaaagcattcatcatactgcagtaag

SEQ ID NO: 79061 - DNA, 53 bp, Oryza sativa
  unsure (1)..(53): unsure at all n locations
ctctgatggcgagtacaccaggatgtcgncgacgaagaaccacacaaacttat

SEQ ID NO: 79062 - DNA, 374 bp, Oryza sativa
  unsure (1)..(374): unsure at all n locations
atcttgatcttgatctttctcggctaaaaagaggagtgccataatgagtgttgcaagggcttatttccatgcttggacaaccaatctcaccatcaattattgaagatttgtcagcatggccacacatattatagcaagaagtactacagattaggccatcatcgaccccatccattgttgcatctttcgattcacatgaatggcacatttttctcatgatataaattctctagattattgagtcactcatttgacaacctgctaacanatactctcgaatatattatctctgctgaactcaaaacttgatagactactcgcaaatattaaatacttgtcacagcagaacaaaatgttgcaaagtagataacagg

SEQ ID NO: 79063 - DNA, 406 bp, Oryza sativa
  unsure (1)..(406): unsure at all n locations
tcaccgctntgagtgatccacgatgtcggacttagggttattgaatggntataatggaaatgaagatggagcaagcagctatgggaactccatcacccaacggagctactataccttttgttacagcanacttaccattcccnctcacaactntgtctncgtgccttnncgggcgtgctcctcaattngatgggacacattacgccgcttggaagcacaagatgaagttgcatctaatctctttgcatccaagtatttggaaagatgtttgtacaggtgttgatgtaccccatgatgacatgaagctcactttggagcaagagcaactcatccaccgcaatgctcaagcttccaatgcaaattctctccgccttgagtcccgaggangtcaacaaggttgatgggc

SEQ ID NO: 79064 - DNA, 427 bp, Oryza sativa
  unsure (1)..(427): unsure at all n locations
attttaatgtagaattgcttgcgganttgtaatgccgattgcatgaggaaataaaacgatttaccccatggcagataatggatatgggccttttctttattggtgtaatgtgcaaggaaaatctctcttagactatgcatagaataattattctccanacttaattggctactcttcataaccgcatttactttagttaattactccggtcaaaaattacttgatgctgccggtggagggagtacctcatgcgcctaatgcacctaacatgagtggatcattatgaatataacaagtattgtatgcttgaatataagtgtagtcccaacaagtctttttatcattagcaatcccaactaatgatgaccaagtgcatgccacttcaagaagattcaaatgatcaaacaaagtttgggtgactttaaaa

SEQ ID NO: 79065 - DNA, 406 bp, Oryza sativa
  unsure (1)..(406): unsure at all n locations
gtattagccganacatgctagatccatctgatcgggtatgctgtaaacatatatagttctgttattaacatatatttcaatctaagtgatttatactgtctcggcatagcgactgatctatcacaatcacttgatttaagtatatgtcgatataagaattatatattgctaatatctacagccgatcgaatagatttagttctttattatctatntccaattgccgatcganttacgtatgacatcggctcagagggtaatgatatgtcatcggcaattagccgatcggctatcatttatggatttaaccgcgggtacccgcgtctttgtttcttgttgattataggatcaaatcaactggcacactagtatacccgaagacgagtgttggacctgcactggagtt

SEQ ID NO: 79066 - DNA, 481 bp, Oryza sativa
  unsure (1)..(481): unsure at all n locations
ctaagcttagtgtcggaccactgatnntgtgggagagaactcacagttctatgactattcattccatatgaccacaaagctagaccggagatattgcgccctagtcgaggtataaagaccatatcacnaattaacagctgacatagcaaattgatgatccatacgcagagtaaggcaagttctgaatgtgcatttcgcctctaaatcgcaggttcaagcatgccggtcactcgtcaccgaggagcaaccgcacgcgatgttgatccccatggagtacttcctcatgggatatgggctctacagaccttctcagctggatagcagcccncggagcacactgaacccaatctgtatatcgcctgaacttcttgcaccggagagcatgggagtgaagctgaagcccattcagactccgatctcgctcaaagtttagcaattggcaaaagaatgaatccttgatgcgctgacaatacagctcatg

SEQ ID NO: 79067 - DNA, 297 bp, Oryza sativa
  unsure (1)..(297): unsure at all n locations
tgctngactgtctttcataacttgcacaatgctattattctctcatgacgagtgttgcttgtatgctaatcacatgatttgttgcttaattaggccttccacctttggaccacctaagtttgcacaagtagttatcggatgcacaagctgctcaaaagtactaaaatataaccgtctttggttccatgtacatgtgaacccatcatttacagcttttctaattagcaaatccacaaccattgatttgggtgagtcatgcacatgtacacctacaacactaacctctacataatatgt

SEQ ID NO: 79068 - DNA, 451 bp, Oryza sativa
tcactccttggctctacaatgagccagacatgtagaatacagtgttctatccttttgagagtactgacactgcacatgctcaccgggatgtggcatacaagcattatgtcaatgagatggacttgttgcagcctcaacatgtaaatacttccaatatcacttctagttagacatttacttctttaattgagatactaaccaacgacatctcttcaacttttgcagattgagtggttaccataccacacaaatgaggcttcaagcctgaccctgaactcgatgtgcaatcgagactctgactatttcatgtaccagtgcccattgatttgtttctgggcagttgagtaccacctttcgcaccgtgtcatgcgacagttctgggaagaaacaagaataggtcggttgaggacatctcaactggagtgaattaacaagtaaaaattcttatttt

SEQ ID NO: 79069 - DNA, 359 bp, Oryza sativa
  unsure (1)..(359): unsure at all n locations
agctngagatttatttatagaggttcanactaccctaattatgacgatatccagattgtgcaagacaataacttccgtatatcataacaatacacaatgaggttttaaagaaagaaaaaacatgaattgtttgcatattttcaagcctgagaaccatatttctctatcttagaatccctggtggtgttacacacttcttcactggaactgcagaagaccgtgataagcctcattccttttatatattttatagggcattctccttccttccccttgatgtacatatttgcacgtgggcgactttgatattttcaaactaatatacctcacactttatttgttccaaggcatttatattc

SEQ ID NO: 79070 - DNA, 341 bp, Oryza sativa
  unsure (1)..(341): unsure at all n locations
agctttcgtttatctctgatncattggctagtcggcctatgtataactaaacttagttgtaatctgaattntatttgtcttagttgttttttcttttgtcgtctgtgtattattacttaagataaaagtgtgaagctagtgcacattgtgggatctagtttcatatgagtaggggtttacgatattttgggatgtcatatagctttagctattttcgtcaaatctaatacatctgatcgttgtcttcgtcttcggccccggagcgccgtcgttcgtcgctttgtcgttcccgtcgatgtgatgcaacatgcaagtccggcggatgtgctgtgctgtgtcat

SEQ ID NO: 79071 - DNA, 423 bp, Oryza sativa
agcttagtatttgttctgagattaccaagagatcagcacggtgtagttggcccaatatactggctcagtaacaacgcaagccagtggtatttgatacatccttatgcatattgtctggtcttcaaccatactgcaaagttgttagtaatggcatccaggcacccttaacttttaaggaaacagaaaatggagtaatcggtgttgatgagttggtattcacttggtactccagcgacataaccagagattgtcaaaaatgtgaaaatgaatgcaaacactgtggtttcatctcacaaaggggccgagcattctgcaattatggtatcttctctctctgaagcagaaatcttacatcaatattatgacttgctttgccttggtaggaaactctatggtctttacctcttcattctcttagtttaa

SEQ ID NO: 79072 - DNA, 485 bp, Oryza sativa
  unsure (1)..(485): unsure at all n locations
ctaagctnggaattacgcatcgtcgtcgtgtctacgacgagatgatgttcgtatttagtatgcatgaatcagccacagntaatttgcatgggttgcttaccttttccaatcattaaaacacaagctggatttttcaataattgttttgcatcgagctgggatttataacttaaaggtataattagatttatattccactcttgtttattaattttgtaaatacaattgttttgatcgatcgatctacattggtataactaatcagcagaccacaatcaaataatgtattctatttctcggtattttctaagataattaacttgtaattttcaggactgtagatacgtggtgatacattatctgcaaaattttttaatagtataattaaaaatatacttctacatatatactattaatatgtngttcctgtattagtgcattaaaataataaaaattgattgagtgcattataaaacatcatatat

SEQ ID NO: 79073 - DNA, 389 bp, Oryza sativa
  unsure (1)..(389): unsure at all n locations
agcttaatattcatcttccaggagattctntaatgttctcaatttgattgatacaacttgatccttccttgaatttttgaacttccactgggttcacttcgttcaagttttcactttctcatctatcccgaatatctgatactgaaattcagagagccataacttgaatcaatgagggagtgcactaggctgacttgtacaactatggggcgcgcctgagctggaccctgtcggatcctgcgcagcgaacggtgtccaccatcaccgcaatcatatgctctctcgtgaggctgcactgcgcgcaccacaacacagaacccaattacaacctatcggaggccgctacagtgaaagcagagaaccacacccatcactgcttgcttggactg

SEQ ID NO: 79074 - DNA, 466 bp, Oryza sativa
agaagaaataagggcttcttgagcatgggactctatgtatagagcttcgcttcatccgggttcgaagcagaagatagtgatgatgatgcccgctccaagaagaagaagatggccctacttgctatcaaggaagcttcatcactcttcgcttcactatacctcatggccaagggttcttttaaggttacctctcttagtgatagtgaaagtgatgactgatcatgacgatgcttcctatgattgccttgtgagttgatcatgcctattgagacagagattgacaagttctaggctctatagaaggatcatgcttccttcgaggtcttgtctgaggagcttaagacttcacatgatagactcaccatttctcaggagaagattcaggaacctcttgaccccctctttccattactcacattgagctcatattgatgttggcataatctgtgactcgcttgatgatagt

SEQ ID NO: 79075 - DNA, 425 bp, Oryza sativa
  unsure (1)..(425): unsure at all n locations
ctatctcgagaggaatgcactcgcnagagaaatcccagaatcattggcaagcagtaaattcgtgcaggttcttgtgctcatgaacaatgcccttagtggacaactcccagtggctctctttaactgttcatcacttattgatcttgacctcaaacataatagctttcttggttctataccacctattactgccatatctctgcaaatgaaatatctcgatttagaagacaatcacttcacaggaacaataccttcatcactaggaaatctttcctccctaatttatcttaatctcatagcgaacaatttagttggaaccatcccagatatctttgatcatgttccaacattacagacactggcagttaatttaaacaacttatctgggccagttccaccatctatcttcaatatatcatcactgg

SEQ ID NO: 79076 - DNA, 271 bp, Oryza sativa
cccaaccccaagcactcagcagcatctatttattgggagccaaagacgcgaaacaggaaaaggaacgctatcaacagcaccactcaaggatcagggggcgaaagacgcggcaaaggcagacacacgacactctgaccacacgacaccggaaaagcagccgccaccccgccaaccaaaatcacacggcacacggtgaacgcgaaaaaaaaaaaagcccaaggcacaccacccaacgcgacggaccggaaaagggcaaaaccccaaaacaaac

SEQ ID NO: 79077 - DNA, 408 bp, Oryza sativa
aacatgtcggcgctgcactttcgcagtaatcaactgcctaatcaggtgtctgatgcaatgcacgcctggggtattgacggccaccagctgacggtagaaatcacggaaagcatgatgatggaacacgataccgaaatctttaagcgcattcaaatcctgcgtgatatgggcgtgggcttatcggtagatgattttggtacgggcttttccggattatcccgcttagtcagtcttccggtaacggaaatcaaaattgacaaaaagtttgtcgatcgttgtctgaccgaaaaacgcattcttgccttacttgaagccattaccagcattgggcaaagcctcaattaaccgtcgggcggaatgcgcgaaaccaaaagcaatttgagatgctcgcaagaccactgcgcgtat

SEQ ID NO: 79078 - DNA, 459 bp, Oryza sativa
  unsure (1)..(459): unsure at all n locations
gacgngacgcgtctcatgtgtggggacgaggctcatgtgttgtgtagnctcttattgcgggcaaagagtacatgcactgcagtgtgagtaaaccaaatctattctaatagccgtgctcgcggctattgagcaccgggacatgtattacacttggctagactctatatacttaacttgtgtgggatgggatattgcatgacgatttctatactgatggagccactttctgacaggcgggaatgtggacgtcctcagaaaaccatgacaactcaatggcggtaagctatctttgtgatcacaatggatggtggacagaaccgtcattgtttaatatgatcactggtactaaaatctgatcagtctgtgctaagctctacgttgtgaatagaattataaaacttgctttgcgcaatagaaccatatccattcttagaataccactgtcatgagcattgttgc

SEQ ID NO: 79079 - DNA, 305 bp, Oryza sativa
tttcttcagataccggaaaacttggcttccatcgcaataagacagggaaatgtctccgatggtgaaaagatttgttcctagtcaccttaacaaaagaaagattgtatgttaattggagaaatgaacattcatatgtcaataaacaggactacaagcatgcatgccgccagtactgagaatttgaggtatatacaaaattacttaggaatcaatttttacttacaagttaatgcatagcggagtaacgatatcccataattatgtctcagtatctcaaacacgataaaggtcccactctaattatt

SEQ ID NO: 79080 - DNA, 478 bp, Oryza sativa
  unsure (1)..(478): unsure at all n locations
actcaagcttcgaatagactggnttagagntgtctaatatttagctttcgattaanganngaacgaagaccaacttattnggaattcaagagatatagtataaagaaagttcataatacattctaattttttagaagcacagtacaaatgtaggcgctcgtataaacgtgtgcacactcaccgtataaatacacacatgtgcaccccatccctataagcacctccaaatactagaccgcaagcgctcacataaacacgcacgcattcactgctatgaacacatacatgtacaccctatctttgaacatcgtcgaatactaggttgtataagcgctcttttaaatgtgtgcactctctatgaatgcacacacagacatcttatttctatgaataccttccgatactagggtggcatatctttgaatttacgaaattactataggcgtctctctgtcaacgggtacgtgacttaccactg

SEQ ID NO: 79081 - DNA, 101 bp, Oryza sativa
ctaattaatctatcactagctacatgatctgtaacacccaattataaatcatgaagtagttcggcttaaaagattagtctcgcagatagacgcaatctaca

SEQ ID NO: 79082 - DNA, 137 bp, Oryza sativa
  unsure (1)..(137): unsure at all n locations
agctngccttgcattttcaaaagcggcaatgaaggaaaaccatcacatgctaaagcanatggagtttcctcgttgagccggagtcataatgatgagaaaatgttgaaagagaactctggagcatgcaatttaaaatc

SEQ ID NO: 79083 - DNA, 465 bp, Oryza sativa
  unsure (1)..(465): unsure at all n locations
ctcgaactcgggatcctgagagtcacctgcagctgcagctcntctcatgttctacggntatcttgagaaggttgagccatgcccacaagtccattatccatgtgattttccctttttcctacacaatccaagtcacatgtagtgctcggggaaatggttgctttggagcaacaaatgttaacacaagtaaaatcaacttgcacttatggctcataggaatttaccggtgcaattatcacctcatgagctgcttctagcatagcatgagaatctataagattttcatgagagcacaaaagctcatcatatttttctttgagcccgacatgcttgctagtactcttctcaaggtgagaattgagctcctcacttctcaaagatgctacacaagcaatagaattagtggcacaagcaaattcattntcccagttttcatacctcataatttatgaagaattagattca

SEQ ID NO: 79084 - DNA, 145 bp, Oryza sativa
  unsure (1)..(145): unsure at all n locations
cagagaacttgatttcaacatcatggcatatatgaataaaaactggngatatnggatctataccattataaattttaccagtttgaaatatgccactaatatttggctaattagaatcatgccattacaatttaactcatatgtg

SEQ ID NO: 79085 - DNA, 399 bp, Oryza sativa
agcttgacttgtagctggacaccggtgctgagacaagagcatgacgagagcatgataagagcaacaatggatttatggtcacaagagatgaagggagcagcgtctacagcggctgatgccttgtgctcctggttctatttgcccttaattttgcatccattagtgttcagcggcagcggcagcagcagcaagctacggcaactccactggccatcacagacgcgtttgtattgttcaataaattaactgcaagacaacaaatgacttgacctgcttgttttgttgtccaaatggcaatgattagttatccacctgctttgtttttttgttcttcccaacctgactttcttaatgcatgcctacaagtgatctatttgtcctgcattggaatacagattt

SEQ ID NO: 79086 - DNA, 463 bp, Oryza sativa
  unsure (1)..(463): unsure at all n locations
atactcagctgctgagtgggaagagtgatgaggtgaaccctttatagcttgaggaatgactgttgtggtggttggacaggtcggtaatactctctcacccccattgggagtgaattcccaccgtctgatcaaaagcctggatcatatggcgatgggactaattcaacccaaccctatgtttggccaaaccagccattactctgcaagccgtctccttttctgcttctgaacacagaacaacgaattatgggcccatttgattgtgtcatttctgagttcctggcccaatcctccacaagtctaattcttgacaacatctgatggattgtcacgtgttttgttggcggtctcctttcattnntgatctctttctctatagatagaaagaatccaaggtccagtgaaaaattgatattctaaaacaaaatatgcattgccagcatgctaattctcctttatttag

SEQ ID NO: 79087 - DNA, 485 bp, Oryza sativa
  unsure (1)..(485): unsure at all n locations
ctcaagctnntggcccatgctccaccanagtcaagcgtacaggctctcaacatattctctttttattgattgtcacaccctacaaantcaaaatatataaattggtgcttaattagaaattttagaaatgattttaaaaaaagcctagaagagaagatctaattctaattaataaattccaatataaaatggggccagataaaatttcattaaatactttgcttaattctataattcctagatttttctgggatttatttgagctaaggaagtatttttaataaatggaattgtatttcatgaataattaaatngaaaaaggtttttaaaagtctcttttgtctttgggccgaaagtcagcccanaaaccctctctctctcttcccggcccaagtcggnccagttcgcagccgcagccgcccgcgcgagttcgctgccgctgacaagtggggcccgcctgtcggagtcgtcgtctttctcgcgtc

SEQ ID NO: 79088 - DNA, 296 bp, Oryza sativa
  unsure (1)..(296): unsure at all n locations
cgaccagcacgcangcaagtttgtattttagttcaaagcgntgcaatagcggcgnttcgttggcgcgaaacaactaaaacatgcacagaccgctggcaacgtggacaattagggtgatacggctgccagcacagcaagcatgcaaggggtgggcacgaaagaagtagaaactcggaaaagccttcctacattcctgatccgcgccatatgagcgccatatgtgcgggctgtggtggctacacgacacgccagagtgagtagtaatcagaccctgggtcaacctaattaatgctaca

SEQ ID NO: 79089 - DNA, 389 bp, Oryza sativa
  unsure (1)..(389): unsure at all n locations
ttcttctctgtttnttggtctctacccgaggcatcgaggccaaccccgagaagatacgagctatagagcagatgcgcccccccagcaagcttagggatgttcaatgcgtcaccggttgcatggccgccctaagtcggttcatatcaaggctgggagagaaggcgctacccttatttaagctcctcaaacgctccgggccgtttacttggacggaggaagctgaacgtgccctcactcagttgaaggcgtatctcagctctcccccagttctggtcgccccggagccaaatgaacccttgctactctacttagcggcgactccgcaagtggttagtgcggcgttggttgtggagcgcgatgaggacaatcctcattncgcgcacccccac

SEQ ID NO: 79090 - DNA, 482 bp, Oryza sativa
  unsure (1)..(482): unsure at all n locations
cttgtaagatctttaatgtgacggagggagagctgctagacttagtagttggtctattntgtgattnttgactgtaaaagtaattttgattntagtttctcattaaatagaanataaaaggaaggaactgaaagggaaactcacgtacgtacgttcggcaatatgatgccaaaaatattaagtatgttggttccagaggatttttttttttggcaaaatagttctaaccatccaaaataatgggtccaccaatttaaatgaaaatagattgtcggatttctcttatttattagagtgtcacttggcgactcgagagcgtttatagggtgccacttggcggtttgggagcgtttgtagaaagtttaatggactcttagtatataatagatagatagatagatataacgattcaaaaactatgtaaaagttacgtgcaaatttacctgtaattacattacaattatactatatntacatccgag

SEQ ID NO: 79091 - DNA, 301 bp, Oryza sativa
attcttgtgctcgagacaaccatgacaaggtgggctcacataggacattcacgcatgaccacgcatagcaaaccccatccagtctcccgtccgtgatgccacaacctcttcacggagccctccgcaccagagcatccctaccatcggcactcacgcaagacctagttctcaccgcccaacacacgtataagaatctcaccttggtggactttgtcgagagtatattggtgggaaagttgtcaccattaccagcaagccctgcataattgcatttgcttcaagtggctacctccgacggatc

SEQ ID NO: 79092 - DNA, 386 bp, Oryza sativa
tgagaaaatgtggcctaaatagcctattcagatagcttaactgctaatatgcaaaatcatttgattgatgatgcccagtagattcatagcatcattcagacttatagaactcacatcatccttgtgctttcgcttgctcttctccttctccttggaatgcttctcctttgaatccctctctgtctaaatcacacacacacacacactgaattactgacatacatcaaaactaatatagcaggtacgagtgtatcctcagcataaattgcacacttccacaatagttgagcatgatttcaagtaagaacaatatacctgtttataacaaatatcaacaagtgcacttccagccgtgagggaaagatgaccctatttcctacctttgc

SEQ ID NO: 79093 - DNA, 207 bp, Oryza sativa
acgaacaggatgcgttctcgcaggccggatgtgggagtaaggctctgcactattgggccttggtgggctgggcctgaaatgctgcacgggccaaaaaggaagaagtttattattcatccctcaactatagccccaagattttgggagtgaagtccatcaccgggccctaaactcgtaccgttgtgtcatcctggtccctaaactcgc

SEQ ID NO: 79094 - DNA, 427 bp, Oryza sativa
tatcttgccatatgcggaattctcggacaacaacagctaccatgccagtctacagatggcaccggttgaaactttatacggccggaagtgccgcacacctttcttctgcgatcagacaggcgaacgtcaactgttcggaacagaagtattagcggaagcaaaaaagaaagtcacaatcattagggaaaggttgacgattgctcaggctcgacggaagagctacgcggataaccgtcgaaaggagctcacttttgagacaggagattacgtgtatcttcgtgtcactccgctcctgggagtacaccgtcttctacaataggcaagttggcaccacgcttcgtgggaccatacataatcttggaacgaaggggagaagttgcttatcatcttgaacttccattccatatgatcggtatacatgacgggt

SEQ ID NO: 79095 - DNA, 298 bp, Oryza sativa
agcttgctaatgggcttgatgggaaagggctaaatggactgtgttctaattggaaaaagtacaccaaaggtccctcaacttgtaatcgagttacaaaatcgtcccccgagcacaaaaccagatgtaacttacaaaatcgtgtactttaggttattcgtgggtttgaccccggatttatccgacgtggcgggtgagtcagcgtggaacccacgtggaccccacatgtaaggatgccacgtcatctgggtctctcttttccctacttttccttcctcctctatctcacttttctcccttt

SEQ ID NO: 79096 - DNA, 374 bp, Oryza sativa
tgtttgattgttgcagcagggattacagctgcgccttgcgcggctcgtccagcggcgaggcgggcggcagcacgtgcgtggagacaggacgaccgcagagcacgatcgcctctttaatcacgttcacaaacggcgtatccagctgatacatctgcgggaattgcagcaaggtctgatgatacccggccgctttcgccacgttcccgtcgcgccaggctttcagaagattcaccgacacctgcggggcatagttgccgctcgccgatatcgccccgtcgccgccgagcagcatggtattgaacagatgatcgtcgtagccgcaaagcacggtgaagtgcggatgggcacctttgacgggatggatcatgctgcgc

SEQ ID NO: 79097 - DNA, 193 bp, Oryza sativa
ccggtcactaccagaaatgaatgcagaagaatctttctcccatcccaacgcgacgcagccttacctaacactggaccctctagcctttcaccttattgaacaatcccaatagaaggaaaaactcccttcttaaatccaaccacccaaacccggatgaaccatccaaccaattttacccagtaaagcaatgatg

SEQ ID NO: 79098 - DNA, 465 bp, Oryza sativa
  unsure (1)..(465): unsure at all n locations
ctattattcttgngatccggatctgttattcattcaatgtgaacctcttgttggatattcaccagataaaagtcagaatatggntcttatgggtggtttaagaaaatacattccaattacaagaacttgtnttttatggagtaccctttctctttgtggtattccacctcttgcttgcttctggtccaaagatgaaatccttagtaatagttggttatattcacccttctttggaataatagcttcttttactgcaggattaactgcgttttatatgtttcggatatatttacttacttttgatgggtatntgcgtgttcattctcaaaattacagtagtactaaaagaggattcggttgattcaatatcgctatggggaaaaaggatatcttaaggagtcaataagagatttcgttttatcaacaagcgaagagtggagtttcttttttttcacaaaatctttc

SEQ ID NO: 79099 - DNA, 364 bp, Oryza sativa
  unsure (1)..(364): unsure at all n locations
attttgctcatactgaacaacagnggcacgaatgcgaggccaagcaaacagctgtttaacgcgctgataagcgacattgtattcccgaatggcctccaactgcccgtgtgtgaagattagcaagaattttctgttgaacttctacattgtgaccaacccaatgtctgttctgaagataaagcaccccattgtgtagagaaaaatttgtactgcttcagagttgatcagagagtttgaccttgctgaggcatcggatagangaaaaccggccacatttattgatcacttggactgaactgatatactgaaattcactgatcaagctggatatgaatatgctctgctgcgtgtgcaacccctttta

SEQ ID NO: 79100 - DNA, 403 bp, Oryza sativa
  unsure (1)..(403): unsure at all n locations
ttcagtgcagtctggcagaggagtgctcccatcagcagccacacctgtggtcaggtctgcaaactacgcagaagcttttaacaatgtggcaaccttctgaagaacctcttcaagcatcaaggggctggtccgttccttgcgccggttgatgttgtacagttgaacattcctgattattntgacataatcaagaagccaatggatttgggtaccatcgagaaaaagttgaatgcaggcatgtactctacaccttgggattttgctgcagatgtgaggcttacttttgacaatgccgtgacttataacccagtcggtaatgacgtgaattaatgggcaaaactttgaaatgtatttttgaaactagatggaagtttatcgaaaagaagcttccttcactagatga

SEQ ID NO: 79101 - DNA, 163 bp, Oryza sativa
ttgcttatcgccaaatgtcccttatattaggaagaccgcccaccccccccacctaattcgtgaagattacctatgggaggttaatgtttgcgctcacccctgttggaaagaggcgctacagttaagtctttttaaggaaatgaaggttgaccggtctaccaac

SEQ ID NO: 79102 - DNA, 388 bp, Oryza sativa
  unsure (1)..(388): unsure at all n locations
tcgcagcaattatatcaacaggaccataacttcttggcaaaatggctcggactcggaacttcctgacagcttttccgctaagcaaaaaatgctgcccggaactttcgggaaggtaagacttagcctctgaccagcatatcacactaagcaaaaggtaatataatgatacttagaagttagagtaatatgcaggaccatagagtatcagcagaagacaataatcaataatcacaaggagaacaccacacaagcaatggagattaaaacaagagggagacaaatattttatcctgaagtttggatcatagggatcctactctttcgtgaggatcanaatatataaagaaattaaataaatctcgagtcctctgccgcttgtatttggtgt

SEQ ID NO: 79103 - DNA, 455 bp, Oryza sativa
  unsure (1)..(455): unsure at all n locations
acctatgatactcagcttcccagttagctcgcttttatctttcccgctggcattgtaatcttttatatttttgntagacgtgggtctgtatgtcaacaattgtcgtttatgtaccctggctggtcctggacagggatttaatgcacattcagcttatanattctggttcgagaatttctgggcgtgacaagttggtatcaaagccgaccttgaccgcaggacaagccaactggaaacctaagagccctttgaaccctttttttttccttcatatgcatatgcccttttgcacttggattttgtttcgagaaaaatttggcgtttgttcttttgatttgtgggaaaaatcatggtcgcttatttaattggatctctcgactagggacagtctacggattattaaaagtttattcagaatttantcggcagtcggtcgtcaattgcgggtgatatgc

SEQ ID NO: 79104 - DNA, 160 bp, Oryza sativa
  unsure (1)..(160): unsure at all n locations
agcttctngtactatgctcctcacaaagaaccaacatgcgtcccttctccagtactgttcccaagcaacaatcctgcattggggtgtcccactgtttctgcatcatgggcatggactctgtgctgtggtcactatcgagcaaaagtggntttcttgaatc

SEQ ID NO: 79105 - DNA, 299 bp, Oryza sativa
  unsure (1)..(299): unsure at all n locations
agctncctttgcttnctttcactcatatctagagcctatcttgtgagattgagagattagattatagtgttggagtgttttggagatggcttgaagattatggttgtttgagcactttggatatcttgtgggctgtcacttgggcttattactcttggagatcttctcctatacggttaggtgtcgcccgtgagcttccaaagatcttgtggacgtcccatgatagtgtgtgaaggttttcctcatcttcgcaaggaaaacgaggtaagtgagttaaagatcttgtgctgagttttcag

SEQ ID NO: 79106 - DNA, 403 bp, Oryza sativa
  unsure (1)..(403): unsure at all n locations
actttttgctngcanaaggtttttacaatgggaaaggttgaccaaacgccttttggttcttaagcatggggataatcaactnttcgttcagatttatgtggatgatatcatctttggttgttcgactcacgctttggttgtagatnttgctgagactatgcgcanggaatttgagatgagcatgatgggtgagttatcgtactttntgggattgcanattaaacaaacacctcaaggtacttttgtgtatcaaatgaagtatatgaaggatctttngagacggntcaagatggagaattgcaagccaatttcaacaccaattgggtctacagctgtgttagaatctgatgaagatggtgaagctgttgatcaaaaagagatataagtatgattggatctttgt

SEQ ID NO: 79107 - DNA, 394 bp, Oryza sativa
  unsure (1)..(394): unsure at all n locations
tataagctaattggccaatcttctgaagaaccttgaatggttcataanacttggatcttagcttgagagaccctctgatcccaaatgcagactgtctatacggtttcaattttaaatataccatatccccaacttctaagtttctttcaattctatttttatctgcaaaatacttcattcggtgttgagcatcatccaaactattcttgagtttgttcaatattgcttccttttcttcaatagtcaccctagcttcttctgatatgttacatggcactgaaaattcattgatttgtggnggagaataaccatacattgctttgaacggagtcatctgaattgcggtgtggaaagtggttgtataccaccactcaactagtgccagccatgaata

SEQ ID NO: 79108 - DNA, 312 bp, Oryza sativa
accgtgcgatttaatggatgtattcacgccggctgctacttctggacatgcgcctatacagcttgctgctgctgcttgccaatctcctgacgcgtgtgccgtttccaggacgtgggctactgctggcctaaattctcgcaagcggtatggatgacgtcgatcagatcgatccggcgactcaatgatccggcgcctcgacgaatcagaggcggctgcttgactgtagatcgatctccaaagctcttataccacttgttttgaaaatatatgcacaacggagacaccaatttacgtataaaacccttgcgggaa

SEQ ID NO: 79109 - DNA, 240 bp, Oryza sativa
ataaaaaagacggtacaggagcatccacgaaggtggcatgacgttttgtcttaggctttatgggctcatcggatatctaatcatggtgcgactcaagtaacaccgtatgagctagtctaatggtatggaggcccgcgttacctgtggaggttaatttacaagctcttaaataaccacacaaatgggtttgcggctggggattatatgaatttaatgatggacaggatagattacgtccca

SEQ ID NO: 79110 - DNA, 458 bp, Oryza sativa
agctttctccagagcaaaagatagagtgttgactgatgatgtttattattcttcaacagttcatgaattcattcatagagactctgcatgggagagatgttccaaagtacaagttgaagctagttgccgatgtccctggaacaggttcttctaaagatggtgaggtgccaaaaactcaagttagtatagatgattctggtgataaaggcaccacaggcggctcaagcggcaaaggtgacaggtttcaggaaggaatggttgaggatcttggtccagaatggtagggattacaaccatactctaacacattccaagatcagaatgactacgctgtgcaacatgctttgatcaatcaatcatgagtcttagtcaacactttaaccaacatggtgaaaacaatgggtgatggcacaatagctgagcatcaagctacatgaccagtgtattgccaggtggag

SEQ ID NO: 79111 - DNA, 333 bp, Oryza sativa
aaaccatactgtaccacgaagcccaggggtccctcctcgacactaccccggcgaatccacttgtctctcggcatcaaagctcccctgattagctaattactcagccagaggtgtcccattccacccgtgtggtcgcactatagtatgctcggatgtaattgcacaagaatcggtccttatatgcgaccgcacaagcatcccgcccaggaatggtcttgtgtcgcgagttttatatttttaaaactcattttctttcacaaggcaccgacccaggcgctgggtttacaatccttttgtaaccaagttttaccaagaagttctcattttttttat

SEQ ID NO: 79112 - DNA, 253 bp, Oryza sativa
  unsure (1)..(253): unsure at all n locations
ctaagctcgccactgactcggagctntcatcccaaatttcatagctcgttcattcagcgctaatttgtgtggaagagataaatgatttaaaaatagttacagtgttctctcgaccgttcgttttcaccctcaaaccatgaatcgcgggatagcgcccttacgaatttggcaggatcctggaggtgagaagcatatccttcgttcggaaattggagccagacagagagagctcttacatgctcttatggatatt

SEQ ID NO: 79113 - DNA, 414 bp, Oryza sativa
  unsure (1)..(414): unsure at all n locations
gtgtaagtttcttgaatcgcaacaaataaattcgacacgaccataacttcttggcaaaatggctcggactcggaactatctgacagctttgtcgctaagcaaaaaatgctgcccggaactctcgggaaggtaagacttatcctctgaccagcatatcacactaagcaaaagggaatataatgatacttagaagttagagtaatatgcaggaccatagagtagcagcagaagacaataatcaataatcacaaggagaacaccacactagcaagggagaataaaacaagagggagacaaatattntatcctgaagtttggacatacggatcctactctcccgtgaggatcaaaatattaagagaaatttanatatatctccgagtcctcttggccgcttgtatttgttgttgggga

SEQ ID NO: 79114 - DNA, 417 bp, Oryza sativa
  unsure (1)..(417): unsure at all n locations
tactcaagcttgctcacttaccgatcaggaggctggaattgttttgtgaatgcctaanatggcctatacttacgtgaggacttgatccttctatgtggcatgaggtaaccctgtgttggcttgcaaagggtttgtcgcgaacctctgacaccggccagtgtctggagtaagatcgcgtcttgcgggtcaagtgtacccctctgcagaggttaactaactgttcgaacagccgtgcccacggacatgggcggatgtgaggtggatcccgctgcgtagatatgtttgcctgtgctttgtgaaatgatgatgcgtatggtgaatcgtaaccagaatcaacctatgtggcagatggatgacctgagtgcgcagatatgaatctgtgtgattcgggatgtcgacacgcatcgtacactatgc

SEQ ID NO: 79115 - DNA, 141 bp, Oryza sativa
agtatattcctaataatgcaaagggggggcttcatccctaagtaaaaaacgctcaacatcataatgaatactgtgctagctatatacacctaaaaataatataacataaccgcctattatacacgaaaaaaattgtatgaa

SEQ ID NO: 79116 - DNA, 394 bp, Oryza sativa
  unsure (1)..(394): unsure at all n locations
gctttatntctctcgacacacatgtatatgggagttccatctacaggctattgaatctaagagagacacaagccaataatttaggggctcacagaccctagaatggtggactctctctagcatgcattacgctgagatcgcatctaccggataggaactcatcccctctgcacggtacacggagcgatccattagcgcgtaattaattaaatatgaactactttttaaaacatgaattaatctgattttttaaagcaactttcatatagaaactttttgaaaaacgcgttgtttggcagttgataacgtgcctccgaaaacgaggaagatgggtggaaaaggggatgctaacacaacgaagccctgaatgatggctctctgcattttatatgac

SEQ ID NO: 79117 - DNA, 412 bp, Oryza sativa
caaaccagctgtccgaccgacgactaacaccacacttctgcacctcttagtggctgggaaacgggatcaggtcacgaaatctaaaaaagggtaacgactctattcgcgaaccacttggctcctcccatcttcccacgggaaggtatgatcactccaagaatggtatgggtgaaacttgtaacaccctgaaaaatttttgtcctagattgcgaaataaaattcgtgttgtaaaaaatcttccaaactcatctgctccttattggatcatttccatttttggaccctgaccccgggacggatctaaacaattatttttaatcaatttatgctaaaacccttgaaaattttctttaaatgttgcaagcctttttctaaacctttataataaacctttaggtttgtttgataaaaa

SEQ ID NO: 79118 - DNA, 369 bp, Oryza sativa
agcttgtctaattattatctgacagcgaatctagaggtgatattggctatgcctctggagcgtgttctcggataatgccatcagacgtcataaactacgataacacgctggtattccgaaccatgctgctatatattatgacgaagttaagtataggatatatatgttattccgaagatatgaacaggtggtttgtgcccaagccacgctggtgccgccctgaagaagctgaatctgatgatgatgaaaacttaactcgtgatgatactgtccaccttcaatacagttatatctatggactgaatgacaagctcctccttctacaaaccccatattggatccattgaggagctaatccacgatcgctgt

SEQ ID NO: 79119 - DNA, 426 bp, Oryza sativa
agcttgtgttctgtgaataaccatcttgcttcaacctggttatgagtaccttgagctttttatatatctgatctgacatacgatgtgacttgtcaaaggctataaaggagtgaactttattcttgatctgaatccagctgcatccagcttctttcttcacctttctatagtccatgagcttactcacttcatccctctctttccactttcctgcagccgcgtaaatgttcgagagaagcacatatgtagatgaatcatgtggctcaagcgatagcagcttatctgcggaaaactcccaagctaacattttttgaactctgcagcacctacaatgtgcgccataccattgacctgcgggaatggatgctcttataagctattgctcatcagcttgctgcaggctatatgatcaccatacatgcatat

SEQ ID NO: 79120 - DNA, 386 bp, Oryza sativa
  unsure (1)..(386): unsure at all n locations
cgaccttgatactcagcttngacatgccgacttgccagtgctngttgcgtggtgcgtancgactggagtatcgatggcactcggtgctacgagtaaacgaaaagatggcactcgtccatctcgtacagcactacagtaacgtacgtggtttgagtgtaagcaacctcagcctattgaataagcacactgagaaggtgcgcttatctcgttctgctctaaagcaagcaagcaatgtccatcgagccaacatcacatgaccagaaaggaaaccgagagaaaatccggagacccgccagggcaagaagaacgtctcccgcacgcgaacccganacagctaaaccttttccacgcctcacgcggaaacctcgtggatatcgacgtcgtcg

SEQ ID NO: 79121 - DNA, 229 bp, Oryza sativa
agctcccgatgtctttctctctctatctgagactagcctaccagcttgctgtatattattaagagcaacagggcaacacgcaaaggtggccatcaatacacaattggacaacctggttcctcctctccggctctcctcctactcctcttgccttctcttcttcatgatcctgcccaatcctaaaagaagcgcctaacttgccgtttgctgtggcttgcgttttgacagc

SEQ ID NO: 79122 - DNA, 408 bp, Oryza sativa
agcttcgtgccttatgtgtatcattctacacatcgccaactgaatatcatacagccatgaatcaacagattacaatttacacatggaaccatataaatttaaattttcatatggcgatagcaatggtgttgctgctgctcacttgatcagtgaagtgaatcagtgatcatcgcagtgattctgttgagattatagacatataatgagttaagctattccataaataaattatgacatttcagatgaaaactagcatgaacgcatcattagatctacacatgtaaactacacacgattacatgatcagatctaatatgcgctacatatagaacactacctgggagactgaagaccagttgctatggtcaaatcttttcatgtgtctacgaaggctcaaacactctagcg

SEQ ID NO: 79123 - DNA, 449 bp, Oryza sativa
tgctgcatgcaagcttcaagaaatttatgtgttatcaaagatagcctttctgtactattactattacatggaatcaaagtgacaagcacggtaaggcgtgagagatcaaacaaagagatggaagttgcttgcatcgcttatattgacacagcagtgggtaggtgcatgagaggatattcttgatctgattggttgctctccaaatatattaaaaactatagtaattattttgaactcatcaaactggtgatttcttgataaaaaatatttcttacaaatagaaaagagaattatggagaggtgaggggaggggcagctaaagagaggataggaggtgtgtgtactgtgcgtctcacgcacggaaaggtgcgaggtgcgcttgaccatgagtcctgttagatcaatctaatctaacgatggagagtgtttcttcctacgaaaatctaatg

SEQ ID NO: 79124 - DNA, 389 bp, Oryza sativa
  unsure (1)..(389): unsure at all n locations
agcttccgattgtctgtgggtntcgctacaagggcatgctgtagctgagcttggtgaataaattatgctcatatgctgtggtgggcgatgagctgctgggtctgttcgtgatgagaccatggtagataccaaatacacctgattatgccactgaagatggagacgacccaaaggcctgtgagctggtcagtgcgccgatgcatgtggtacatgaaagcagccatgagcgcagccccaatgccaccaatggcagtgcaatacatggtgagctgactggcagcatcactactgcgaatgacaatgtgcttgccatatatatgtgctgcaatgccacggatcatgagtccaacattgcgtgtatgcacagtctcatcaacaatgatggatgc

SEQ ID NO: 79125 - DNA, 252 bp, Oryza sativa
  unsure (1)..(252): unsure at all n locations
tatagatactcagcctgcaatagctcattcggatacaataaggtgattctgatgcagatttgattttcaagagttcaacgagctatgaagaacattttcagcattgaatacatatgcaaaggttattattaatttctgattatatactgagacatacttattttccttccttgcacactctgaaggatgatcagaagagatcattatatgaccacgtgacaatttccacctatttaantgaacaaatgccaa

SEQ ID NO: 79126 - DNA, 451 bp, Oryza sativa
agcttcctgctatctatgtgcaaaaatgtgatagttatatttttacataagtcttgatatttgatgactaatatggtaaatatcaattatgtaatggaccttgagaatgctcaactgcttgtgcagaagtgcgtacttacacagatagctttctatgagaaaataatccaatagtattctttccatgtgaacaatctaagtctacctgcatataaatgaaataaatttgatcaaaaggtagtgatcagtagctacatatacaaccttggacaaagttcgagtataattaatttactcttactccacgtatggcttgacgaaatactagaagtagtatgcttctaggctgctaacctggaccaaggaaacatatcttggccagtaactagtaaaaacaatagtctcagtgtaccaatactttgtggaaatcgatggctattgagagttacat

SEQ ID NO: 79127 - DNA, 254 bp, Oryza sativa
  unsure (1)..(254): unsure at all n locations
gaaagccttacatgtatttctgaccagccatttgcttctgatgcacagtctgagaggcggttgggtgccaaatcataacgtgatgatggtggtgactctggtgatgatggcattgaaatgaaagtggagcaaccaacaagtatttctcgatcaaaactcgtgttcctatctataatttcacataggagccacaacattctctgtaanatattgttttttcttgaatacgcatgagagttgcgtgtcatttcatt

SEQ ID NO: 79128 - DNA, 427 bp, Oryza sativa
  unsure (1)..(427): unsure at all n locations
tactcttgcttatatatattaattcactcttcgaatgcacaattaattctggaattggttttataggctctcattgtagcatatctacacaacgtcttgaatcgcttaagatatatttcctgcattccacattgatttacatatttcattagtacatcacgacctagaaaaaataataactctctcctactatatttactctagcaacaaactcgatgtatgcaccatactcattattgtctagcaaatagcaaataaatatattgcatgtgggtgataaatacttgngagcatagatacatgcattaatgtctatttacttcaatgcacactatacgaatagacataatgtatgcacctatcccattatttgctagccaatatacaataaaacatttgatatgggtattaatacttgtgtgcttga

SEQ ID NO: 79129 - DNA, 425 bp, Oryza sativa
  unsure (1)..(425): unsure at all n locations
cgcnagcttatattttttctattggccccttcatgatgcaccgaagttcggtggactctcatcatgatagcaatgactgggccaccaaatttgtgtcacagagcatggctatctctagcacacctaaactgctttgcacagcactacatagaatgatccattgcttaaataccttatcagattgatatgacataacaccactaacacctaatcaagtcttctcttacagtagcatatcggatcagatcgatataaatcccacttaccatcaaacgttgtcactcacgctttggtacaccgattcgaaattcacaaccgatattatgttatctttgattactaaccataaggagcctagagaaatagattcttgatataataaacaactgcaccaatgtttatctgaagattgcatccttgtattt

SEQ ID NO: 79130 - DNA, 375 bp, Oryza sativa
tcttgcttgactaggtttagacgaataaatttggcaccacactttggctagccatctacaatattgccacactctgttactaattgtctaatctctctctcggtagaactctattcgaacagaatacgaggaagaagacatataatagactcgtgactcgggaagaagcactagttgggaggatattgtgtaagttattcttcatcgatgcctcttcccctctcacacttgcggttatatactcacacaagtttacaggctcatgcccattccggtccagacactcgcacattcggcatgcgctctctatcagggcggatcctatacttatcaagattgagcgccattgtccggtccgctacagtagtggtaaca

SEQ ID NO: 79131 - DNA, 185 bp, Oryza sativa
tgtgcacaagaggtcacagaagtgataattggagagatcggagatggttatttcaccatacttattgatgattctcacgatatggcagagagatatcaaatggcagttcttgtaaggtaaagtggttatatgttctctacttgaaacaactaccatctcattgttgtaccaccttaacatattct

SEQ ID NO: 79132 - DNA, 433 bp, Oryza sativa
  unsure (1)..(433): unsure at all n locations
agcntctgctgcttctctctctctctctgggnctagtctaccagcttgctgtatattattaggtgcaacagggcagcaggcagtggtggccaacaatagacaattggacaacctgtttcctcctcttcggctctcctcctcctcctcttgccttctcttcttcttgttcttgcccaatcctagtagaagcgcctaacttgtcgtttgctgtggcttgcgttttgagagccggaggaggcaggattgatttttccatgattgggtttcttgattgattggcgcctgctgctgcggtgcggttggtccaagaaacgggatttcccggcgcggaatccggtcattcaagaggggagatgatctntctttccttgccctgcttctctcgcggttcttaggcgttcttggcgttctggtcttcaatataatatactat

SEQ ID NO: 79133 - DNA, 229 bp, Oryza sativa
  unsure (1)..(229): unsure at all n locations
tgagtgcactaccacaagggtgtaatgctcaattatagccccagccaccagctgacaagacataggccagtatctgcgttgacctttagaagttgcatacagcagctgagatatcaagttcaagatgaagaacccgagtgtaagatagttattgttngttacaactgcagtgaagaaaggcattactccaaagactgtgcccaaccaaggcanaatcgacctcacatta

SEQ ID NO: 79134 - DNA, 430 bp, Oryza sativa
  unsure (1)..(430): unsure at all n locations
agcttnggagaatatgtcttatgtggagtcctggcttataccccagttgagcgcctgtgaagatggagccgtacgcccgctagtccgctgctgtttatttgtgattgccaggcctgaagcgcctttgtaataatgtaaatattatcgatataataaagatgtgtcttttatatcatgtttgtgtggtgtaccccggctttttctgggacggtgattaatacactagcgttcgggaaaaggcaattctcccggtcgcgacaagctggtatcagagccatctctactgtatgataagctaagtggataaaacctaaggacatattttatatatgatactatttccgatagtccctttttcctcctttcccctgtgctaattgcaagatattaactcattcttccttcttcaaatttcaactaatactggatg

SEQ ID NO: 79135 - DNA, 300 bp, Oryza sativa
  unsure (1)..(300): unsure at all n locations
gtgccacccttctccgataatctatctcattcaagaatccaccanagtgtccaacgagatcacgctaccgacatcttatgagacatcaacaacgaaatatccactcgttctcatattgcacatatttgtgagcattactccgttatgtcttctcttgaacctctaacggtggaagaagctcttaatgatccggattgggtgatggcgatgcaagaggagttgaacaatctcacctgtaatgaagtgtggactntggtggagcgacctcggcanaatgtgattggcacaaagtggatcttt

SEQ ID NO: 79136 - DNA, 352 bp, Oryza sativa
gcagatacgacaacaggactgaaacgcgacttaagcttgtgtgggcactggcgtgcgtgatgcagagcagggcgacaattacctcgctgggtaccgtatacacataactattgctggttcttgtgtatagcatgtccttatgttgtgggattgtcgatggacctggtggacaggttacccaaccggataacggataccgattagggctatgctgaggcatgggatgattatctactggataatggtattcccgcctgctataattccttaataaacgactggcatgctcgctattcgcatattttacttgtgccgccagtataaagcaaagaatggtaaatatcttccaata

SEQ ID NO: 79137 - DNA, 391 bp, Oryza sativa
cagcttttctatggtcagaggcaaacaaatcatgatatatcatagcaaaatatattctagtctcacttgcttgctcacttgattattgcgtattcacttgcttgaccgaaatattggactacattagaaaatatgaggggattatttgttaaatactgcaaaagcacgatggcagattcactggcaccaccagtagagatttttaaaggagtacagctattgaaattataactataccgtgctttttattatgattatatcaatactattccctcatgtcatatcctaattatggtgataatcaataatgtaacatttctagatttaagtgcacatatattaggacaacatgtatttaagaacagaggtaataagttattcttacgtcagt

SEQ ID NO: 79138 - DNA, 324 bp, Oryza sativa
  unsure (1)..(324): unsure at all n locations
tgaagcttctctcgagtctcactacctgagaatgtttcctctactatagagatcatagatatcagtgtcaatgcttcagggatcttgctacgaagacttcattatatgctctgagctntatctgtggatctgttngacaatgtgagagnttatccaagatccagtagcaatgttgtagagatctcgctgctagtacttcatccatgataagcagagtaccatgctaaggctagagatctttcttgcgcagtgcatatgcttcatattcacaagagtatgtactttgtataactcaacaatgttgcattgttgtcttgcgtgact

SEQ ID NO: 79139 - DNA, 456 bp, Oryza sativa
  unsure (1)..(456): unsure at all n locations
agctntacattatctaatgtaatccaaggtatcaagtgccaataccactttacaaagcaacaactcctatgtttntctcttccatcctttctaagagaacctaatgctcagttcagaattaagaatctggaagaccagaaataacaacagaatgcattgcagttacctcttcaattcgctgcttcaattgattaaaactctcttttaaaaaggctcggaaggtgccaccaattgtaacagaatcagggatgacattgaagggctccacctccttgaaatttcctactgttactacctcgaaaacaaagccaccaagaggggaaagacttacattctggagtatacacaaagtgcaactcacatggcaatgtgagaggaacaaatgattagtagcatcatatttaacanaacttataccaaaccattggaaanattgatgacggataagaagtaaat

SEQ ID NO: 79140 - DNA, 439 bp, Oryza sativa
  unsure (1)..(439): unsure at all n locations
taaagttattaccgtatattggtgataaatcaatgagcttccaatatctatgtgtacgtaactacaaacacgtgaatttagcccgtggtggtcacgactcctccgtcgaacatctctacaataatataataatagtttttaccttcatgtttgtttcgataataaaataattattttatgaatatatagtaatgttgaataagattaaataacccataaatgcacattttatcatacgcaaggtactaaaattagtggacaccagtgaagtggactacttcatccctggcaatcacgcgaaagcgaggcatatacagccttacctcaacagcttaactgaatgaaaaatcggaagangggtataagtggttacacgtgaacccattataaataacataagtaaaatatagcatattgaatttacaattgatttatgggt

SEQ ID NO: 79141 - DNA, 479 bp, Oryza sativa
gctcgacccgggatccttagagtcacctgccgcatgccagctttcttatgtattaaaggaagtacaatacgtgctttcatgaacactactacataaacgatgtttcttgtttagaatcctatagtttgcatagggaccgtatctggtcccatataagaaaagagacttgcattctttcagattttttctaagaattaatattattttaatgtgaaatcgcaaaagttaaggccatccagtgaaatcgctaattataggcctgtccaactggtgtagttcgataggcccctatcgaacggtgagcgttcgactggaccctgtcgatgtgcctatcgtacaaagggagtgcgacagggcgtaccacccggcgccgtgcggcctgtctaacagggagcgttcgatatgttcctccaccgctcctatctgacaatgtgctttcgacatgctcttttataccgcgcgcgcctatgccgcgttgc

SEQ ID NO: 79142 - DNA, 291 bp, Oryza sativa
  unsure (1)..(291): unsure at all n locations
agcttctttnatgtctgtacaagacctgattactcgggatcagtcggatcactcggagaatatnctccgacgagaaaaaggcacaagctcccgcttggaaggccctgctgtgtgcatccgacgccttgtcaatatatgcaaacatctggctgctcttggagtgcacatgggtcctgctgatccacttcaaggatcaagactattggcacttctggctctaggtgcttctgatattatctcggtgacagaaaattaatccaagatggctctgcataacattggtgcttcaaa

SEQ ID NO: 79143 - DNA, 326 bp, Oryza sativa
  unsure (1)..(326): unsure at all n locations
agcttgcttgttctggatgaggaagaagacatatatataggggtacgactttagtcccggatggtgttatgaaccggagctaaagatcgccggatctgtaccaaccgggactaaagttacgatctttagttccggntggcgttattaaccggggactaaagatcctcaggggggcctgataggtcctgacagcatttgaacagggactacagatcatttttagtcccggtccaatatgcccattaccctttctaaccgcggcttaagatcattttagtcccggttttgttgaaccgggactatcgggaatatctcgaccgacaatg

SEQ ID NO: 79144 - DNA, 294 bp, Oryza sativa
  unsure (1)..(294): unsure at all n locations
gtactcatgggccctgaaattccttctagatcagcggctatgttcgtttgaagtngatgctgtcaggaggtccaaatccaaatccacaacgtgtacaacttgatctcttgtcttctatgggccaaaagtgacatggtgaggtagaagtatatttggagaaggtcttggtttggtcttgattccgctnctatactcttcagaagtttttgtcggtcgagtttggagttgcggctaaggtttgccagtgcttctgccgaatattccttttggcgaacctcctcccacacgcgactg

SEQ ID NO: 79145 - DNA, 409 bp, Oryza sativa
  unsure (1)..(409): unsure at all n locations
tgcttgttatgtgtgcttacgttcttgagattagtgctnacatcttcatggcactctaatcttgtttatgtgaatcgtcgtgttatcatatatactatacaatctatgtcgatattactatctgatcttgtcagctagcttctatcaccgaaatcacccgatagaattagacaatgttgtcgatctagattatatagtatatccaccatctcgaagaggctttcattggcttgattgattagatcttatgtttctcttcatgcttaatgtgcatcagttaagtttgattattaaataatatttagaaccataatatctagcttgcttcatgactgctaatagagatagtatctgaggttcagccaatcttaccatacttagcctatctgtccttccttcattacttgat

SEQ ID NO: 79146 - DNA, 306 bp, Oryza sativa
cgtagatctccaacctcatcaagtaatctcacatctctattatcatgtttattcaacaaactctgataatgcgctatggctgctggaatgtttccaattatacttccatgtatgttcagtgtttgtcaaatattcacgtccgcacatttatccggaagctcagtgatacctttatatatgattctcaaacactgtaattggcacaagaatctgagatatttaatatgtgtggttcctatgctatcacaatcctcacatatcaatactctcagataacggaactttgggagatgaggtgtatcttta

SEQ ID NO: 79147 - DNA, 362 bp, Oryza sativa
  unsure (1)..(362): unsure at all n locations
agcttggtgggtctcgggattagggggggcgcaaaaggtgtagtaatactagttgggttgtgtgcgtgggtggnggttatgattctacgtgcgcggccactacccgtggaaatcgtggaagggaattttttgcggcgaaaaggtgggggaattagagcgaatttacctatgccgtgacagataacgataaaaagacacacgatttttcagtggaactgtggaagggagtttttctctcttttttttttttttttgaaaaccggaagggagtttttctgaccctacagagaccaaacagatcgctcgtgctcggtgctcccttcgcgttgacacggaaggaaacgactcgacggcttcgttgt

SEQ ID NO: 79148 - DNA, 235 bp, Oryza sativa
ctcttattttgcctcttctcgcaacgcgacgagttaaatatccctacttgttttcttatgggacgatatgtgatgacaaatgtaatcaagcctaagaatgtacttaccaatgtcatagtagactaccgaacaaccatgtccattttgaacttgacgctactttataatataaactggtggcctacatgacctaaagttgcattcaatgctcctaactatgataacctcttaaaat

SEQ ID NO: 79149 - DNA, 442 bp, Oryza sativa
acgctgaatactctgatgattcactggaaaaagccggcgagcttgatagggtagcaaggagctcaaccacttagggcttattcggaatggaggaatcgaaaaacacatgaataggaatatcataggaatatgataggaatgcacgtgtaaaacagagaattgaataacataggaatactatataaacatgcgttcggatagagcgtaggaaaaacatacgacattttaaagaacctacccactaactataatcatcatgtgtcagaggagtgaagcttgtgaagattactttgtagattgcctcaatcccatgcacatgaaaaataataagaagctggagtggattgtccgtttcctgtggaatggatggccaaggaaaatttccttctaatttcctttgatttcctacacgcgattctttgatccaatgctgctcagtacc

SEQ ID NO: 79150 - DNA, 213 bp, Oryza sativa
aactagcttctttgcacttaatgatgtgcactctgaagtggtttttttaaagattagttatttgaccttgacacgctgtattgcaagagcaaaatgcttaattcctaaaggtacatgacagaacacaactgagaatatagtccgtgaactcttgatgggccgtggccccataatttcacggatcgataccctaaaatatataactgactaatg

SEQ ID NO: 79151 - DNA, 410 bp, Oryza sativa
  unsure (1)..(410): unsure at all n locations
agcttgctatagtttctactcatgcttcaacctggcagcaactggtnggacacatgttatgagagatcactgaactcggatacaggtaagcgtatgtagacaacgcactagtcatttcagaatctgaagagcaccaacgtatggaagcataccataagcacctggccgtcacaggattgccatcatgccatgaaaaacaggtagtagtattcatctgggagctgccaagcacaatacgttcaaattcaacataaactaaagagaactttttaagacaagccacaatttacatacttagtacggtatattactcagataggcagagatgccagccaaaaggatacggatagtcatcagagattcatagctacgacgttcatgcaaagatgcatagggaagattcactcaac

SEQ ID NO: 79152 - DNA, 454 bp, Oryza sativa
agcttactaaagtggtattgttagctactagagctatacccgaactcttccgaaggcttccggacttctgattactactctatttctattccactagcttaagaacactaaactaacttgagagaatatgagagaggagaaaagctccttaaataggcaggtaatgaccgctatggtggctggaatggttggatataccctccaaccgctgtagggagtgaatcttcaccgttccctcaaaaccctgcatacatcggcgctggcattggtttagtcaaaccccctggtttggcaaaccctgtgctggcccatacagaccacaagttgactggtggcctcctagacttcttctctgcgtagacttgtgaatattggcctaattgatcgtggcatttctgagtttgtggcccattcatacataagtctcattctctacatctcccgaatgatctat

SEQ ID NO: 79153 - DNA, 283 bp, Oryza sativa
tacttactctattaactgagacttattacaacttggatcaccaacaatacagacatcgatgtctccatctaagcttataccttcatgtgttatctatgtgaacaccacccacaaacatgagaacgagagctctcttaattctttgatgcacaaagacagtgggacatatgctatctactatcttattgaaaaaatcatgaacggttctcattctatcaactatatcttcctttttttactgtaagagagaggggggagtgagataattaataatctaacactt

SEQ ID NO: 79154 - DNA, 450 bp, Oryza sativa
tcagctcgtactcggatccttaagtcacctgctgcatgcaactttctttttcctcctcgcctccctaggattctctctcgacgattcggtgggattctaagattgtgtaggttgggcggttgcgatgtgtatgcgtggccctgctttgtgggttggttgcggtgggttcttcttgtactccaaatggggatgacgaggcgatggtggatggctctgctggcccacactttagtgagagtgttatgcgggttcacccgtcattgatagtgtgaggcaccgcagtggggtccacttgtgacttgttttctttcctccttgcaaggcaataattgttgggccgatttctgtggagcaaattgtctttgcccacgaaggcgcactacgtgtttctgaaagacgggatagctatcaaattctaaaatattttcttcttatattgaagcatttctg

SEQ ID NO: 79155 - DNA, 280 bp, Oryza sativa
atgaacctttctgagcaaacactaccgactgtcagcgaggagatcctaatctctctacggcaaggcaactcaagcgctcaacttcttggcttggatcatttgtaacgctaccaagcagtccgtttccacctgtactgcgagcatctgtacactggatgcagccaaggcatatccgctctctgcgcgcgaccaactctgcttctaatgcactatgacagctgttcagggtttgcagaacaaaaatcacctccctccacgccctatgatatgccaagccccc

SEQ ID NO: 79156 - DNA, 432 bp, Oryza sativa
gctttattcttgcatataccttttgaaatatttcgattccttctttaatttaataattaactgtggaggcttcccctacagtgttttccctcaaaaaacaatattattgtatgtattcacgtcacttttaacacatgcaatatatgtattatatcctaataaaatgtttggtagtggctaaatgtatttatgtattaaataattaattaattgcaacattatcgattaaaaattaatattaaaatatgtagtgcgaaaatttatattttgacgcgaatattctcctaggcgaacttgtcccattttcgtaggtggctatgtaaccatattttctggtggcgaggcacactcccatccgcttgtgaagtgtcacgtcctgataaattcattccgaaataacaatcacttctctataaggaataatagaattaa

SEQ ID NO: 79157 - DNA, 200 bp, Oryza sativa
  unsure (1)..(200): unsure at all n locations
gcatctctggtcatgcgtgttatttgctctgcgctcttaatccaaaaggcatggtgatgtagcantacgccccgaacggcgtgatgaatgaagtcttccagtagttggactcctttaaatggatttgatgatattctgagtagcaatccaataagctgagtagctcgcagccgtgcgttgagtcaactacctggtcaatg

SEQ ID NO: 79158 - DNA, 439 bp, Oryza sativa
gctttcttttctgccgatatgcaagtctttgttgagcccgttgttctgtataaacctagaagaccaataaccgagtatggaaattactgaactcactatctgcaaatgcagacctactatacacaatgcattgcgtatgctgctcacggtggctgtaaacgagaacacatgtgggcgtcaaggttgactccatccatggttcggaataagataatcctgtgctggatacctgagatcgagcatggattgttgtgacttctttgccaactcatcgttgacattaatctgtagctacttcataatccattggaaagagtagttatctttatacgaaaattgcataaaccacctcagatatcactctgaatttagaatctcccgtataagaatcactctgatttacactcaatatcactctgattaccttggaagaactata

SEQ ID NO: 79159 - DNA, 444 bp, Oryza sativa
  unsure (1)..(444): unsure at all n locations
agcttgtgtttatctactctaacntgcgtcttcaatcaagatntacctgaagctataaatcagggcctaacgccatgtgggatgcacatcccgaagactccaccatctaagtgtgtataagcatatgttaactgattatttatttatttatttttcataccttggcaataatgtgcatatatagggtgtgtttggttgcaagccacactttgccacagtttgccacgcctaacgttaggcaaatttgacaggtgtttggttgtatccacagttgtggcaagattcccctccaacaaattgggtcccacgtgtcaatggctcaaaaaatgtggcagattccttangctaattagtgtggttacaattgatcactcacttagcaagtgtgcaactatgttggcagaatggtaagtgtggtggaaccaacagcccatatgtatgtgt

SEQ ID NO: 79160 - DNA, 444 bp, Oryza sativa
  unsure (1)..(444): unsure at all n locations
agcttgaggatgcanggagtacgccaacgtgaggccgtcggtgtcggactcgagctcgaggaggctaggagcaagccaaggtgagccgccaatgtcggacccgagctcaaccacgtcgcggctagggaaagatggggaggggagaagtgagcattgacaaatgccctcccatattttttttctcacttacttggaggcccacgcctatctttatttcctttgatgattgggttgctacgtggatgtcacgtcagtgaaatcatcctcaaaacagttgaggttgttggtctacacggttttaataattggagtggttaagatacccggtgtaccgttgaacaataataagactcaaattggactaccagttgagggagccaaatcgactatctgtatagtagaagaactaggtacgtgggcaagacccaggaaaataatatgtgg

SEQ ID NO: 79161 - DNA, 461 bp, Oryza sativa
  unsure (1)..(461): unsure at all n locations
ctaatcttntcataactggttacctagtgtgatntctacgataaatctagagcttttctatgtcaactcaattcacagtccgctcaatttatgagaaggaagccaacaataggctcgaatacattctgattggcccttctctaatgtaagttangagtatgcttgcacgtgggtattctcttttatattatctttggtgggtctgctcacatcggaaactttagattcttacatcacgctttctctaaaatcttcgcagtcttgaaaatgctggtgaaaattctgtcttgcgcatccttatatgcgtgagatctgttttggggctttacacttcaccatggaaccagaaatttgtctcgttggcatcagtatgatgtactatcaggccctttccccattcatctctataacattaacacaacttgtactgtactcaatggtatattgcttgagctgaattt

SEQ ID NO: 79162 - DNA, 410 bp, Oryza sativa
  unsure (1)..(410): unsure at all n locations
tcagcttcttcgtttcatatgtgctngntggcagggagttgggttggcggaaaagtttcttcaacacaaccaacaagtcgttaaaactactgtcggaccaaccatttctggccttcaatctcataagctcaagcaccgtccacaacaatgtgaaatccttctcacagccctttgcctcatcgtacaaaagatcattcgctgcctttttcaatgcatcaaagttatccaacccacgagcggacccagcaacaacctcaggtttagcatgacgcaacatctcttccaaatctgcaaaattaccattatctacgctgacattaccatcatcggcatcatcaactgtattgtgctgaccattgccaccaacaacaacatcatcatcatcaaccggttctactgcatacaacttc

SEQ ID NO: 79163 - DNA, 297 bp, Oryza sativa
  unsure (1)..(297): unsure at all n locations
ntatctctttgtggagatcganaccgatgtagctcaactcgtaggcatatactcatcgaaacaatgtaaagtagaaaaggtggcgatgcgctgaaagtgttattgaactagtttaattgttacaaagtctcgggcacatatttatacctcaaatacataatatgtcgacatcggacacgacgtccactttattacaactctaaaatacgaacaaagtccttaggctgactcttaccgaaatatttatagactactagaatatcctacttattagatacaattgcctgcttcggactc

SEQ ID NO: 79164 - DNA, 450 bp, Oryza sativa
  unsure (1)..(450): unsure at all n locations
agctttagcttctgctgatattgaggaaggagtcctgcttttatgcctganaatcatgaagctcagcagcaagatcctttggaatatggggttgtgatcgacgatgattctccttctgaagagcttactccttcgttccccagttctactgacagtaaacaggatgcacctcttggccccattgtccatccttctgtaactacccctgaggaagagcctatgggagaaccagccaaacaaacatacgcttcagtggtaagcaggcatatgctgccttttagtcaagttgaattcctaatttctttctttggttgatgttgaactctttggactgaatggaattttgtcagctgcgaacaaaaggacactctagccatcaggctattcactccattcctctcaacaaggccacggcaagtagtgtggagtcacaactgaatgacatatgac

SEQ ID NO: 79165 - DNA, 195 bp, Oryza sativa
  unsure (1)..(195): unsure at all n locations
tgctggttcctctannatctgctgcacctcgtagtataattgtagtgactactacaagtgctacagttgctcgaatgatggcattcaagatacaccaactgtggtacctcactgatactacctgctggtctgtgtgccgaaatgctgtcttgcaagaccgtgatcctagtattattgatgacggcttgatttcta

SEQ ID NO: 79166 - DNA, 457 bp, Oryza sativa
  unsure (1)..(457): unsure at all n locations
agcttgttcattcttggtgatgcgttggatggcgcttatgtccggtcgtttctgatctcgacttccaaacgagggcgcgcacatgcatgctcgctcgctccatgatcagttcggaaccagcaactggtttgttccagctctcacgatctggacaggtgtggtagcactcccagtacgtcactgcattaacttgaaacccgtacgtagctcctgatcagcaaaataatgttctgtgctactagtaataggcattacacgtccctcacaatcacttcatntgtactcgagccatttgatagcatcatgatcacacagtactggacatgatgttatccgggagcatagatgctttcccgtttgaaacttaatgtcacctgcccgctaacttatacaatactgaatgctaacaatgtgccccttggatactattatgaacacactactgtagagtgatgta

SEQ ID NO: 79167 - DNA, 363 bp, Oryza sativa
agcttctccctctcattcttatggtcgaacgggcagaggagcacaatctcatctccagcgctagcggtgaagacagtgagcataacccgcgccgtctagcacgtacttcactgtccccctctcgccgaagtcttgggcgggaggaggcgctctaggaggtcgaaaaatacgcgacttcgtcgcacgctggcgatggaaaatgactgcgagacggggagcagtcgtctctcgtctacagagatggcagcacgcactcaggcgcgctccatgctgcgggcgcgctccctgcgtcactcgccggcattcctgatccagagactacaactgtacgttggctagatgacgtggccatcatggtcatga

SEQ ID NO: 79168 - DNA, 142 bp, Oryza sativa
tttccctaatagtcctatgagggtgacaaaagaagggataaatgtattattgggaatctcgggccacgacttgatcaataatgcgaacgccaaagatcatatagttgcaaaggatgagtaatctatattctaaaagaaccaa

SEQ ID NO: 79169 - DNA, 469 bp, Oryza sativa
  unsure (1)..(469): unsure at all n locations
agcttggtagatctgtctgttcgtgctggcatcagcgtaactgctgctgatgaaaggtgagactctgaaaggagtcaaatgtattcacgctgcacgtacgtgtaccagtaatccgatgagatgaacaacgacgcagggttattgaatctctcggtcggatgttttctggcactgcacgtcagctgccactctcggcgcactgttattatagtgtgcataatatatctcaattgggccaaaaatacgacttctgtaatgggcgctatctctaacggacataaatagaagcccgacactaacaatagtcatcggtgactggcagtaaggccatctcattcgggcctttgttgggcctagtaattatgccccgatgagacatangtagtaatctcaatcgggcctaactgtgagcccgtcactgatgagtggcatctgtgacggactatacttatatgcaccttgcttatat

SEQ ID NO: 79170 - DNA, 374 bp, Oryza sativa
agcttctcggttttctattctgttcccgacgcatagaagcaaatcctgagaaaatacgcgcgatagagaggatgccccccccccccagcaagcttaagaatgtgtaatgcgtcgctggatgcatggccgccctgagtcgatttatatcgaggctgggtgagagggcgcttgccctattcaagctcctcaagcactccgggccgtttgtatggacggaggaagctgagcaagctctcaatcagctgaaagcttacctcacttcccccccatcttggtagttccgggaccggaggaaccattgctactctacttggccgcgaccccccatgtggtgagtgccgccctatgatggaccctgagttcctctcgacact

SEQ ID NO: 79171 - DNA, 293 bp, Oryza sativa
  unsure (1)..(293): unsure at all n locations
cgaacctttgctcgtcccgagtaaaggactcacaanaatatacttggtatctgatcatcgagtgctactatgctgtatatctcacatgtatatgcgcaagaagatatgtgtactctctctcaatcaaataaattggcacggtggcttacccttactcctgantcccacgagacactggcctctcttgtcttgagcggttgagagacagaacacaaacaacaactcgaatatctngtggtacctcctcaaccttgctacgcaactctgtcataataaccatagctctttcatat

SEQ ID NO: 79172 - DNA, 369 bp, Oryza sativa
gctttcttttcttaaattagaaaactattctcattgttcattgcagattttaccggcatgagatgattactgttgaatagttatcatgcatcatgagaatgcagagtattcctctggccttcttttcccttattattgctatggccgctattcaaggtatacatgactcgcgcggtagtgcacagccatcttatttttacaacgttccttctatcattgtacatcatggatgaacgcccagtataattaagcaatataagatgagaacatagagctactgtactttacagttcaactttgtgctatttatgttcgcgccaactttacaacgaggaacgtgtaaatagtgatggttgcccgcatcaagtc

SEQ ID NO: 79173 - DNA, 249 bp, Oryza sativa
aatctcgctgttagtacttcatacctagtccatgaggaccgttgaccgcctattattgtgccacagaccaaacatatacattctgaaactagaaatctaaagctgattgcatacaaaacagaaagtacacacaattgtcatgccaatacccttgctagattgaaacacacgacatatactttgtcattcacaaaacatccttgttgatctgaagcccagggtcacacatatacttgttattcccaaata

SEQ ID NO: 79174 - DNA, 301 bp, Oryza sativa
cgcttcttgattgtgtatgttaacatggtgcttctcttgtggactttcgtacaaaggccaatccatattatactctttgatatgaaagcaactgaagatcaaccagagtgtagattagattataatgatatgtgatcatgacctctgccaacacgtcctaatggatgattccggtgaatttcgaaaatgttgtacatggcaactattataggatgtataggcacggatcactcgttaattctaccctagaccgacgtatatacgtattcgccaccttaattttatactgcctttggattga

SEQ ID NO: 79175 - DNA, 371 bp, Oryza sativa
agacttgtcctctttgctttgttctgcatttctacattatacctttccttacggtatgaagagctgatataagtctggtagtaaatcaatatctatttgtgtagtatagggtaacaaaaacattggtgagcctacatgttcttgatatcactgtagtttcttttcgaatactttctcaattacactatgctagtgaatttgtcacacatcatgaattacaatttgttcaatattttctactctcgtcacaaatagatatcctagaatgcacgcaatggacaaaagtttgagatttgacatgtgacagattcattaatagggttatcttgataaaaatcatatactatctcaaaagtataacgtcctatact

SEQ ID NO: 79176 - DNA, 331 bp, Oryza sativa
gcgaccaagaactcactgaagacggaccattgctattacaactatggattgtattgtccccgcttcccttgactatatctacacacctcatttattttcacggctccacaggctttccatatccaggcggggcctggatatagatcagtaattctactggatctttacatgcaggcctgacattgacgacactgtggtgccaaatgcccttcaacctagagcctctttactcctcctgcataatatgtgtccagaagcccatactacacacccgtccgagaaggggggccgcaaaccggaatacgtacaactgggagctgcaaaacactga

SEQ ID NO: 79177 - DNA, 402 bp, Oryza sativa
agctttatcattctctgtagatcaataatccggaaggaaatcgacgcatggtggaccatgtataagcccgggagtacaccgtcgatgactaccgtagcagtcgcgccgtcgccgaaccagtacaccatcgccaagacttcgccgagccgcgtttgattcttggcgagcctcctagtagtccctagagtccttatcatacgcatgcatgattagatcgagcctcataacccacatgcatgtgcaagccgagcttagccaccgccactaacaccctaacagccgctatagagcaccaaatcttgccagaaagacaccaataggttagcacgggttgtctatacacattttggtttgggagcctgagctgattcgccgctgttcgccgcctgtgatgctgtgaac

SEQ ID NO: 79178 - DNA, 340 bp, Oryza sativa
gctgatctctgtcttgatctctaataattaggtttctattatataagattccaaggaacatatgttcagattgtttctgtagtctcttgatcaaagccttcttgccacttcagttttacttctgacactcgatgatttttttaacgaatatcatgtcttacatatctagtctttgcgatgattatcctgagacgttaactgttactcattgtatttatgaatctgtactaaagacaattctggcataattcgactttgcaacttgatatatgatagttgtatatatctggatttacataacacacatatttatctgaactcgtgtggtgaactacctctc

SEQ ID NO: 79179 - DNA, 453 bp, Oryza sativa
  unsure (1)..(453): unsure at all n locations
taagctttttttttttttgactctgacatggttntcgatatgctactttgactaacaatatctataaaagtaagatgtcttaaataaaaagatttgcatattatgataatttggttaatgataaatctagtaatatcaattttacatgatcgatcttttaattctttttactattaatagtcaaagtttaaaatatttgacttgtcactttgttaaaaatgtttatatcttgagacggagagagcacataagagaagtccacacattggaagaaacgacaattagcacaaattcgttccgctaaaattctattaaaagtgcatacacatgtgtgattattgatttaaacacctctgtgattggagatatgcacccatgacttcatcgtcttatctacgatcatccaatgcttgactcgtcaattctttactttattttactagaatatgtcta

SEQ ID NO: 79180 - DNA, 174 bp, Oryza sativa
  unsure (1)..(174): unsure at all n locations
tncgtaatagctcatatacttcttattgctctctgccctgtagataatgttatacatacttatgagcccctatagctcgtcagatatcatccttgagatgacgttctagcgaatcgataagtagatcgcacctcatacgctcctctctaagtacattatcaatgatcacgcgtt

SEQ ID NO: 79181 - DNA, 178 bp, Oryza sativa
  unsure (1)..(178): unsure at all n locations
gtgagatgatcattaccaacatgtccaagtctacgataccaaaacatcacatctttatcaaacttagcaaccaaacatgttatcacaggtgaaataggattttcanaatcagctttanacactcttccatagcgagaaatattcaacacagaatcaccacaagaatcagaaactttac

SEQ ID NO: 79182 - DNA, 435 bp, Oryza sativa
agcttcttacctgtattaatatcctatggtctcatactctacgtattgtccgtagtagagtgctgcattcttaataactaaggcatagatcttcaatgtatggtactaatagtggaagaagggttctttctcggatatggctcataagaatgcgcacatcgccgtttcaaatcaaatcttcggcgttattgagatcgcgcgagatgtgactttgactagactaacggctctcaagtatagctagttgacctacatgtactatatgaagagaatgaccctatcgatactatcaagacgttatctctataatatattctgcctagagaagcattacaagggcctctttcttcacacaagcgagccattcatatccaccaagataatgatctctacctcacacttgaacatgataaggagtatgcactccatcttccc

SEQ ID NO: 79183 - DNA, 432 bp, Oryza sativa
  unsure (1)..(432): unsure at all n locations
agcttcagaatctgttcattatttatagggtacatacaaaacaaactatatttggaagtctaatcatccgatcaaagtgtattttaccaatatggaaagcttggggaaaactctacagctttgtctataggcagcctgactgatatttgctgttaacccctccatatacaggttcatctactactatccacattatgacattaaaacaatagtcatactaaaaatattatatctcctaaaccacttgagataaaaacgcgccctttggttagaagataatccaaatattatctacaactttctagtatacacttttgcaggaataacattatagccccgagacataataactgaagcctgaaatttgccacatgagaactgtacaaacanactgcacacccaactccttcttagcctctctaacacaattaa

SEQ ID NO: 79184 - DNA, 179 bp, Oryza sativa
ctcagcttcacgagctcgccccaccactgtccatcctcatgtctgaccatgctatcttgatttctgcccttactgcctgaagctcatgtatcgtaggagaggaggatccgatgaagccttcactactttaaaatagtttctctgacagtcaaacacgtttcgctactggaaatggcccg

SEQ ID NO: 79185 - DNA, 381 bp, Oryza sativa
  unsure (1)..(381): unsure at all n locations
tcggtagtaagagagtgaaactntctaaaatagtacgagatgcctntaagcacgtttgaacgcatatcatggatataattaaaatactggaccttgtccgtcgtcactcgccgccgtgctatcactccctaatgcaatatatcggctgctttataactgacatctattatgacgaccaatccacaccatattttctcgcaaattgaacctgggcaacgaaggaatattctgaaacacagggtggcgtataagtggagagaaacgaagcgctgacatgcacccccacgtgacggcattggataagtcacccaataagagcacgttgtgctacatgagtgcacagtagctggcatgtctttctccctttcaactacttggttc

SEQ ID NO: 79186 - DNA, 299 bp, Oryza sativa
  unsure (1)..(299): unsure at all n locations
gagcttgttccgggggaggggagtcgttctgcggattatagtgtgaaagggtatcattaacatcagggccggatcacattcggcctggtgtgctaatgcctgcaatgaatgatantcgcgtcttatcatgccaccattataaatatatcgctgtgttgcggtacgctatcgccagcgtatgccagaatcatatataagcacgttgggagtcgtcaaggtgcagcangagacatatatggagaaccagagctgggtgaaaaactcgcacgccgcctggggcctgtcatgtcgttaatctc

SEQ ID NO: 79187 - DNA, 441 bp, Oryza sativa
  unsure (1)..(441): unsure at all n locations
agcttgttttgaatnaaaactcccagctgatcctactgatctgatgnttatggcttgctctttggtggaatcgtgggcaactttgcagaagcatgagggaagtcgaataaatcttcaattgggggccaggttgctaaagcaagtggtaaatgaagtctacaactcgaagctcagctggagaggaggcgttagaaggattgggtcattactcaggagagggaatgtttactgagttttttgtgtggatggattgagcaaagatagctctgtaatagataatctagctatggccttttgcataagggtcggttgtcctccctaagatgctttagattttttccgttttgctggttggtactcttgtaatctgacttgatctcatttctagtaaaagaaatggcggcttcatgctctatttcttaatacaaaaagaggcaaggg

SEQ ID NO: 79188 - DNA, 273 bp, Oryza sativa
ctcagcttgcagtctggactatcggtggcttgaagtcacttctcaatttatgtaactccgggctattgagttgccttatattcttccagggaatgactatcatcggacatgcaaatttgggtttccaaccatttcttttacaaaagcttgaatatgaaagaatgagaagctcctgaatcaaacagaactattgcgggtatggagttgacagagaacatacccatcacaacgtttggagcattctgaagcggttcaacttgaatgtgattcaca

SEQ ID NO: 79189 - DNA, 51 bp, Oryza sativa
  unsure (1)..(51): unsure at all n locations
agccggacccgggatcctctaagncacctgctgcatgcagtttgtgtttct

SEQ ID NO: 79190 - DNA, 417 bp, Oryza sativa
  unsure (1)..(417): unsure at all n locations
agcttcctcatgtatggctngcgcattnaatcccgaagagagagggattggaaggacataatgtggaataattccacaccacaatatgtgtgaagtaaatccccttcaaatccccctcaatccccctatgagagagattaaacgaaccaggccttagctatatcatcactaagttacaaacattatgatagcacaatgaataaattaggctatggatatgcacatttatttgaaagcttgaaaccacatgtgtatgctgntatcacaatctttggccctgacgaattggtagcgtgcaaccaacacaatacaatacagtgttgtgttaagactaattctgatgagagcctgtttctcttcttgtagtgctctcacatntccctagatcgtcaaggtgagtctccactaaatttctga

SEQ ID NO: 79191 - DNA, 438 bp, Oryza sativa
  unsure (1)..(438): unsure at all n locations
agcttgatagcgtacacacatacacacagcanattgtatgcctggcctagaagcagttaaatacaacaaagatccaatcatacttctatanttcctttgatcaacagcttcaccatcttcatcagaatccaacacaactgtagaaccaattggtgttgaaataggcttgcaattctccatcttgaaccgtctcaaaagatccttcgtatactctcgttgatgcacaaaagtaccttgaggtgtttgcttaatttgcaatcccaaaaagtacgataactcacccatcatgctcatcttaaattccctgtgcataatctcagcaaaatctacaaccaaagcatgagtcgaacaaccaaagatgatatcatctacataaatctgaacaaaaagttgatatcaccatgcttaagaacacaaagcgttttgcaacctttccta

SEQ ID NO: 79192 - DNA, 352 bp, Oryza sativa
  unsure (1)..(352): unsure at all n locations
ngtgtccggtgctcctgtggctagatccgacatcccttccttcctttcttgtcagatctcggggctcccttggctagctagatctggcatatattctcgctcggatcggagcatgcacgtggtggctatcggctgccaaggacgatgctggccacagtagaaagtctgtgtcagcacaagcaaccgtgcgggtgatgaccggaggtcagctcgcatggcacctcgagctacctcgtttcgctcgtgagccanatagtacatntttgactagtcttcacttcaagatagcacccaagtcccaaaataacataagagattatactagttgcagaaatgaattctgtgattcaat

SEQ ID NO: 79193 - DNA, 429 bp, Oryza sativa
  unsure (1)..(429): unsure at all n locations
tagcttgattgcttacgttctaataattcgtgatcaggaagaagtattaagttacagctcaagatcagggaaaagcataatttcatctgagtcttgctctgatcccgttgaaaacgttttaaaatcttgcaatatgcatggaccactactatgaatcaacatatcgccatccttgatattcattaactgtggtggcttaattagtcgcttcggcatatatactaattngacagtacaacagttatttcatatgctgcgtgatctgaagaattttcgtccttagaggcatcttacgcgtgccatccatgcctgaaggatgatctcacatctgagcagattaaatgcgatgaattagattcctatatttactcgacctcttattgctanggatatatataaccttctctatggtgcgtactaatcgtctga

SEQ ID NO: 79194 - DNA, 459 bp, Oryza sativa
  unsure (1)..(459): unsure at all n locations
agctttactgtttgactacctttaagatgcattgtaccaactcctataaaggttgagtaactgcggcataaaaggattataaggtattgggcactagatcacgtgcacttttgcctaagcaaaaagatgcctaagtccctaaaagaacgtgacaggctacacctganaatatgggctgcagacatattaagcctatgccaaaaaatatgccttcgacaccctttaaaggatgatgcatgtaacatgcttccgagtaataaacctttcgagtgatatagaccaagtgtagctcatatgaatagcttctgatctgagtgattatcctctatgggatactccataatagatataacaattgaattccgactggcgcaagtattcngttgataacccatacggtgaataataaatagtccagcctctgagcatagaaaatanactcatgatcatcatattcat

SEQ ID NO: 79195 - DNA, 251 bp, Oryza sativa
  unsure (1)..(251): unsure at all n locations
tgtatctacactgctnttagatacactaccactaaatagcaaaaagcttgttttagaccttcttggtttttatggattggagtatgaccctaccctcaatnttgcanttttttcataaactgcanaagccaaaaggccagcttatacacagaaggtaatatacgactaagatgaaacaaacaggtcaagtttaccagagaaaagttctctgtgcaactctnttgtctagcttgtatgaaataaagttcaca

SEQ ID NO: 79196 - DNA, 406 bp, Oryza sativa
  unsure (1)..(406): unsure at all n locations
agcttcttgccttatttgcataatagctcactgcagngacatgagcacaggcacattgaatccatatcagcattcatcattggtcatattaaaactagatcaaaatgcaccacttcaacatttcatcaacccaatgcaaagttggtaatggtaataactactatatgcttaatttgcttangatataagagtgagcaaagaatcaatcgaacagcttaaacggacatactataagcaaagatccgtgtacgttcatctatcaataaatcgtgagagcaatagcaaatcaatcccaatgagcagggcagcaaagagatcctgtcctgaaagaagaacaaaaataaaagaaaaagtccaagaaagcacacgcgcacacatatataaattnttctcagatttgaatacc

SEQ ID NO: 79197 - DNA, 395 bp, Oryza sativa
  unsure (1)..(395): unsure at all n locations
agcttgaaggctgtctnttgtactgttcaaatcgccacctgaagtattcgatccacagatccgacgacgtgctccaccttgtgcacatgtccctccctgcgcataacctgcgagcggtgcactgtggggcacctcatcacgcctctatcaatggatctcctgcaggttatgataccatttgttagaatgcacagccaaacccaccaacggaagaccaccctattcacattggacctgctccaccatagacccaaccataatcacaactntagattctggatctacacaactcagatgactaggtntattcgacacaaactctaacaggagtctcatcatcaccaatgctcggttttgcattaccatctgctgtgaggcctccatctcactccttt

SEQ ID NO: 79198 - DNA, 287 bp, Oryza sativa
catactaagcttaatctaccggtacctcctcatcaagtcgaatgcccgtgtgtgtctatgttgttgatgggcttccatctacaagctaaacctctgagagatcctgatgacatgtttggctacaacggccatcctgagtgctgattggagttcacaggagaagcttaactctttaatcatgacatctcaaatccctaacatatattaccaaatcctgcaaatactttttagtaaaccgatttgatggctcactaatttgcacaccagaaccatccctgatttttgga

SEQ ID NO: 79199 - DNA, 350 bp, Oryza sativa
  unsure (1)..(350): unsure at all n locations
agctcgacccgggattcttaagtcacctgcggctgcaagcctgaacggttactcctctattctgctctcgaanacagtngatcaggaccatattcgatggaagaaacaagatgtaacatatgacatgagcatgtttatcgttttacttggttttaaaacggtggttatatacgcctacatttaattcagatgtatcaccaccttattacaaaatcactatcttactggttttactacgattttagtcttttaattgctgcgaaccgacatgcattgtcctgtccctagatactttcaaaatatccctaatgctcactcctctaatccaaaactatgaaattctaaaaggc

SEQ ID NO: 79200 - DNA, 282 bp, Oryza sativa
gggaaataaaaaaatataaaaaaattttatttttaagggggaggaggtggggaaaaaaaaatgagaagagatggatgtaggattaaagtaagagagagagaggagtgttagaatgagtaagtgagtgatagagtgaaaaaaaaaaggaaatgaaggaatagaaagaaaaaaaaggaattgagagaatataataaagaaaaaaaaagtggaaaagaaagtgagaaaggagaagaaagaataaagtgagaaaaagaagagagaaaaagtgagaaaaaaaagaaa

SEQ ID NO: 79201 - DNA, 243 bp, Oryza sativa
ctgcagtaacaacagcaaaatcaacttgcgttacttggggggcctgcgtgcgtattgcggcagggcatattctacacgctgggaccgtatacacatactattgggggtcttgggtatgcatgtccttatgttgtgggatgttcccatgcaccgggctggacgggttatcccgaccggatcaaggatacccgataagggcatgggatgcattgtgatgattatccactggataagggattcccg
